United States Patent Application Publication US 2022/0031776 A1 - sequence listing, part 7

SEQ ID NO: 283 - DNA, 5272966 bp, Klebsiella pneumoniae (residues 1,757,657-3,515,312 of 5,272,966)
  modified_base (3084)..(3118): a, c, t, g, unknown or other
  modified_base (28433)..(28436): a, c, t, g, unknown or other
  modified_base (118067)..(118310): a, c, t, g, unknown or other
  modified_base (118851)..(118896): a, c, t, g, unknown or other
  modified_base (120449)..(120449): a, c, t, g, unknown or other
  modified_base (194278)..(194326): a, c, t, g, unknown or other
  modified_base (584922)..(584993): a, c, t, g, unknown or other
  modified_base (711312)..(711341): a, c, t, g, unknown or other
  modified_base (715352)..(715400): a, c, t, g, unknown or other
  modified_base (765525)..(765701): a, c, t, g, unknown or other
  modified_base (812107)..(812110): a, c, t, g, unknown or other
  modified_base (812502)..(812502): a, c, t, g, unknown or other
  modified_base (857630)..(857672): a, c, t, g, unknown or other
  modified_base (858090)..(858182): a, c, t, g, unknown or other
  modified_base (858823)..(858981): a, c, t, g, unknown or other
  modified_base (862845)..(862958): a, c, t, g, unknown or other
  modified_base (865109)..(865146): a, c, t, g, unknown or other
  modified_base (865226)..(865388): a, c, t, g, unknown or other
  modified_base (866202)..(866559): a, c, t, g, unknown or other
  modified_base (866925)..(867036): a, c, t, g, unknown or other
  modified_base (867121)..(867426): a, c, t, g, unknown or other
  modified_base (867608)..(867654): a, c, t, g, unknown or other
  modified_base (870232)..(870256): a, c, t, g, unknown or other
  modified_base (871603)..(871702): a, c, t, g, unknown or other
  modified_base (915086)..(915090): a, c, t, g, unknown or other
  modified_base (1078260)..(1078399): a, c, t, g, unknown or other
  modified_base (1437186)..(1437315): a, c, t, g, unknown or other
  modified_base (1474838)..(1474960): a, c, t, g, unknown or other
  modified_base (1833250)..(1833311): a, c, t, g, unknown or other
  modified_base (1849808)..(1849884): a, c, t, g, unknown or other
  modified_base (2382722)..(2382724): a, c, t, g, unknown or other
  modified_base (2518065)..(2518120): a, c, t, g, unknown or other
  modified_base (2565196)..(2565222): a, c, t, g, unknown or other
  modified_base (2715478)..(2715507): a, c, t, g, unknown or other
  modified_base (2716052)..(2716069): a, c, t, g, unknown or other
  modified_base (2932552)..(2932675): a, c, t, g, unknown or other
  modified_base (2956671)..(2956674): a, c, t, g, unknown or other
  modified_base (3023549)..(3023584): a, c, t, g, unknown or other
  modified_base (3040821)..(3040950): a, c, t, g, unknown or other
  modified_base (3111775)..(3111801): a, c, t, g, unknown or other
  modified_base (3118418)..(3118422): a, c, t, g, unknown or other
  modified_base (3118876)..(3118876): a, c, t, g, unknown or other
  modified_base (3154319)..(3154319): a, c, t, g, unknown or other
  modified_base (3269529)..(3269710): a, c, t, g, unknown or other
  modified_base (3309401)..(3309441): a, c, t, g, unknown or other
  modified_base (3335149)..(3335152): a, c, t, g, unknown or other
  modified_base (3360871)..(3360879): a, c, t, g, unknown or other
  modified_base (3416473)..(3416532): a, c, t, g, unknown or other
  modified_base (3628287)..(3628377): a, c, t, g, unknown or other
  modified_base (3687336)..(3687340): a, c, t, g, unknown or other
  modified_base (3689484)..(3689493): a, c, t, g, unknown or other
  modified_base (3750363)..(3750397): a, c, t, g, unknown or other
  modified_base (3755060)..(3755177): a, c, t, g, unknown or other
  modified_base (3755667)..(3755794): a, c, t, g, unknown or other
  modified_base (3786881)..(3786881): a, c, t, g, unknown or other
  modified_base (3836150)..(3836159): a, c, t, g, unknown or other
  modified_base (3922163)..(3922163): a, c, t, g, unknown or other
  modified_base (4002041)..(4002090): a, c, t, g, unknown or other
  modified_base (4020308)..(4020355): a, c, t, g, unknown or other
  modified_base (4253670)..(4253671): a, c, t, g, unknown or other
  modified_base (4407247)..(4407287): a, c, t, g, unknown or other
  modified_base (4481789)..(4481888): a, c, t, g, unknown or other
  modified_base (4611337)..(4611453): a, c, t, g, unknown or other
  modified_base (4611987)..(4612023): a, c, t, g, unknown or other
  modified_base (4757534)..(4757557): a, c, t, g, unknown or other
  modified_base (4778509)..(4778557): a, c, t, g, unknown or other
  modified_base (4864858)..(4864950): a, c, t, g, unknown or other
  modified_base (4898019)..(4898074): a, c, t, g, unknown or other
  modified_base (4898178)..(4898240): a, c, t, g, unknown or other
  modified_base (4898624)..(4898864): a, c, t, g, unknown or other
  modified_base (4899005)..(4899060): a, c, t, g, unknown or other
  modified_base (4899122)..(4899164): a, c, t, g, unknown or other
  modified_base (4903024)..(4903183): a, c, t, g, unknown or other
  modified_base (5011684)..(5011702): a, c, t, g, unknown or other
  modified_base (5031234)..(5031344): a, c, t, g, unknown or other
  modified_base (5117782)..(5117974): a, c, t, g, unknown or other
  modified_base (5125879)..(5125958): a, c, t, g, unknown or other
  modified_base (5166378)..(5166504): a, c, t, g, unknown or other
  modified_base (5166581)..(5166581): a, c, t, g, unknown or other
  modified_base (5244451)..(5244518): a, c, t, g, unknown or other
  modified_base (5246908)..(5246931): a, c, t, g, unknown or other
ccccccctggaacgacagcatggaggcgatgttaatgatcttcccgccgctgccctgggcgataaagtgtttcgccgccgcctgggacataaaaaatacgctcttgatgttgaggttcatcacgtcgtcccagtctttttcgctgaacgccagcgcgtcctcgcggcgaatcaggccggcattgttgaccagaatatcaatatggccgaactccgccaccgcccgctccagaagctgaggaataccgtcgatctggcgcaggtcggcggtcaggctgagaaaacggcgtcccagcgcggttacccgctcgatagtctccaccggttcgacgatattgataccgacaatatcgcagcccgcttccgccagcccgagggccatcccctgacctaaaccggtatcgcatccgctcacgacggccacttttccctgcagggagaatgcatcaagaatcatattatgttccttagtcgttcagagcctgctgtttgcaggcaaggttctctcggcccggtccgcgccggcggcgcgactgagcgtggggcgaactctcgggcatagcccaccataatgaaattaaaacagagttccgttttgctgatgggtgccatcttagccccgcccccagccattttcaatattatttaaaacgatgtttcattttttatgatgacgattacaaaaaaagaaaaagcgaaggagcctcccggcacgcgccaggccggaaaaggttttgaaaagatgaagattcaaccgattgtctgcagaggtgccgaagcgaagccagcagcccgctgaaaacgcgggaattacgctgaactgcgtgagccatcacaaataatgaaacgatgttttgataaattaatacccgtcttttaaaacatatcactcagcgacacgcctctggtccagcggcatcgcaggaaagaaaggagcactacatggctaaaggcatgcgggtcaaactgaattatcacgtcagccacgatccggataccggggcggaagtcacccgcttaacccccccggaggtcacctgtcatcgcaactacttctatcagaagtgcttttttaacgatggcagccatttactgttcgccggcgagtttgacggccactggaactactatctgctgaatatcgccagcgccgaggccgtccagctaaccgaaggcgccggggataacaccttcggcggcttcctctccccggacgataagtcgctttattacgtgaaaaatgaccgtatcctgctggaagtcaacctgaccaccctcgccgagcgcgaagtttatcgcgttagcgatgactgggtagggtatggcacctgggtggcaaacagcgattgcagcaaactggtgggcattgagattgccaaaagcgactggacgccactcaacgactggcagattttccatgatttcttccataaaggaccgcactgccgcctgctgcgcgtcgacctgcgcagcggtgagagccaggtgatccatgaggaaaaaatctggctgggacacccgatctatcgtcccttcgacgaccataccgtcgccttctgccatgaagggccgcacgatctggtggacgcccgcatgtggctggtcaacgaggatggcagccatgttcgcaaagtcaaagcgcatgctccaggcgaaagctgtactcatgaattttgggtgccggacggttcggcgctgatctacgtctcctatctgaaaggccagcaggggcggacgatctatcgctttgatcccgaaagcggcgtcaacgaggccctgatgacgatgccggcctgctcgcatctgatgagcaatttcgatggcacgctgctggtaggcgatggctcaggtacaccggtggatgtcaaggataccggcggctactccattgataacgatccctggctgtatgtctttaacgtggcggaaaagcgctacttccgcgtcgcgcgccatgatacctcgtgggcgacggtggccaacagccgccaggtaacgcacccgcacccctcatttaccccggacgatagcgccattctgttcagctccgataaagacggtaaaccggccatctatatcgcgaaattacccgcgcacccgtcaatgctgagcgcctgatccacaccacacttttttctgtaactggccttgccctccttcgcggagggcttttttgtcccttctctttcccccataaaaaaaccccggctgacggcgccggggaaaacaaacgatgagggatgaatggtcggtcagaacgagtaggccaccccaacgcggaagcgggtctgacgatcgctgcggtcgttcaccccgacgttgccaatttcaccatacggcgaccagttattatccagcttataggccaccttcacgttatattcctgcgagtagggtttattgtcgttgcggctgaccccttccgagctgcgggcatagacatagttcagctctgtacgccagtcgccgaggacaaatccggcccacgcgtcgccgcggttaactttgtcatcatctttgccggcgttgttcggatagcgggtgtattcatagcgatagcgagcggcgacatagaagccgttgtcgaagctgtactgcgcgtgcaggtgcggcttgtagatggagcggctgtcgttgctctcaatggtaaacccgggggtgaggaaaaagttcgacgtcgctttccagcgccagctgatggtgtcttcatgaccattgcccaccacgtccgaatagggttgcgaaccgttgtcgccacccgaacgccatttggcctcgacggtaaagcctaagccgttggcaaagcggtgagaaacggagacgcggtcagcattacttttatcactctttccgccatcaataaattcatgacgtaaatctatcgttaccgcggttgctgcaaaagacataccgcagagggcggcgagaaccagagagcgttttaacatagggtacccttacaataaataaaatgacatttcgtttttatgaaacatcattttattttttagacaccatagttttagtgaccaggatcgtagttatttgtttcaaaaaaggtggcacaacaagacgtgacgaagctcaataatttcgccggggagagtgaaagagggaggggaaaaaataaggggtcggcaaagcacggcgcataaaaaaggcctcccgcaggaggccatggaaatcgaggtatagcgctatgcgcgttctaccgccagcgccacgccctgaccgccgccaatgcacagcgtcgccagacctttgcgggcatcgcgcttgatcatttcatgcaccagcgacaccagaatccggcagccggaggcgccgatggggtggccgagggcgatcgcgccgccgttgacgttgacccggcgctcatcccactccagtacccggccaaccgagatcgcctgagcggcaaaggcctcattggcttcgatcagatcgacgtcgtccagccgccagccggcccgctccagacagcgacgggtggcatgcaccggggcaatgcccatcagcgccggatcgacgccgacgctggcgaaggcgcggatccgcgcaaggatcggcagccccagctccagcgctttagcctcgctcatcatcattaccgccgccgcgccgtcattgatgcttgaggcgttgccggcggttaccgatccaaggcgatcgaaggtgggctgcaggctggccagcccttccgcgctggcatccacccgcggttgttcatcggtatccacggtgcgcgccgcgccgttatgctcggtgacaaccgggacgatctcatcgcgaaagcgaccggaatcaatcgccttgcgcgccttatgctgtgagctgagcgcccaggcgtcctgcagctcgcgactgatgccaaattcccgggccaggttttccgccgtgacgcccatatgataatcgttgaaagcatcccacagcccatcatgcaccagactgtcaatcagctggctgttgcccagctgggcgccggtgcggctgtcggtaagcacatgcggagcgcggctcatattctcctggccgccagcgatcaccacgtccgcttccccgcactggatcgcctgggtagcgaggtgcagagccttcaggccggaaccgcagacatcgttaatggtgatagccgatacggtgttaggcagcccaccgcgaatagcggactgacgcgccggattttgtccggtccccgcggtcagtacctggccgaggatcacctcatccacgctgtgcggatcgattcccgtcttctccaccagcgccttcaccaccacgctccccagctcgacggctgaatggcgcgataatgcgccctgaaagcagccaatcggcgttcgcagcgcgccgacgatcacgacatccttcatcctctacccctgcccatgcatttgcgcaaagaaacagcgatatactagataattgttatcaaaaaactttgtaattgtttaaaaaaagtgaagccaatcacaaagaaatagctattcgttaacgttcacgccgctgcagatgctgacgcagccagctgccggccgctcccggcggcgctttcttattccacagcagatcgactgaaatcgcccgcggccagccggggatatcgagcgccaccagcccgccctgcggcgcaaactccgccaccagcgcgctgggcagaatgcaccagccgaacccctgcgccgccatgctgagcagcagcaggtagtttggcgccgaccagacctggcctgcggcaggttcggtggcgctggccagaaaggtgctcaaacgcagctcgcgccagctgcgcagctcatcccaggcgaccttaccctgcgccgccagcggatggccaggggctacataaatgcccatcgccgtctgcagcggcaggcgggtgctgccgatatcggtggggtagcgctccctcgcctcaatcagccccacctgggcgcgggatttttgcaggagatcgatcacatcctcgtcttcgccaatcaaacactcaaactcggtatgaggaaagcggcggtcaaactgtaccagcagatcttccagcacgtccgggtgcagagtatcggagagcacgaaggtcagccgcggctccgtctcgccggacagcgacacagccagttcgtccagccgctcgctggcggcaagaatcgctttgacatagctcagcacctgctccccctgcggggtcagcgtcggttgccgcgttgccctgtcaaagaggattacgccgagatcggcctccagattggcgatggcggtactgatcgtcgactgacttttccgcaggcggcgggcggcggcggagaacgatccgctgtcgaccgcctcgacaaaggcggttaaggcttccggtgaataacgcatgatgtatctacaatatcgatgggtcctatcttttgtttatcatatttttccataaactgccgggtaatttcctgttcaggctaaaactggaggtagctcgccatgcaacagaccccacatcagcgcaagacgctcaccgaacgcgttatccacgccatcaccttcgaaggactggcgacgctgatcctcgcccctaccgccgcctggctgatgcagcgctcggtagtggagatgggcggactgagcattctgctcgccaccctggcgatggtatggaacattatctataacgcggcgttcgatcgcctgtggccggtctcccgcttcccccgccagctgaaagtacgcgccctgcacgcgctcggtttcgaaaccggattcgtcatcattggcgtcactatggtggcgatcgtgctgggcgtctcgctgctgcaggcgtttatgctggagatcggttttatgcttttcttcctgccctacaccatggcctttaactggatatgggacaccctgcgcgagcgcgttattcgtcaccgccgcccgcgccagacggcgcgcggttaatcccggcgcggatcttcgacgatccgccgcgactttatcaccaaaaactatcgcaacagacgaaccataaatatggtaaattgcactccttttttttggtttgacggttgataaagtcgcataatgtctaaaatttggtctaaagaagaaactctatggagttttgccttatatggcactgcagtaggcgctgggacgctatttctaccgatccagctgggttcggctggcgccattgtgctgttcatcaccgcgctggtcgcctggccgctcacttactggccccacaaagcgctgagccagtttattctctcggccaatatcgcgccgggaaccgggatcaccggcgcagttaatcactactatggtaagaaaattggcaacctgatcaccggcctctatttccttgccttctttgtggtggtgctcatctacgccgtggccatcaccaactcgctggccgaacaggtggcgcatcgcacgccgatgaccccagggctgcgtgcgctgctgagtctgggggtcgtgctggtcctcaacctgatctttctcatgggacggcaggtcaccatcaaggtgatgggctttctggtcttcccgcttatcgcctgtttcctgtttctctccctctatttaatccgcgactggcatccggagcatctcaccagccagatgcagttcagcccgcagacgctccaccaggtctggatctctattcccgtgatggttttcgcttttagccatacgccgatcatctcgacttttgctatcgatcagcaggagaaacacggcgacctggccatgggtaaatgcaaaaaaatcatgaaggtggcctacaccatcatctgcgccagcgtgctgttttttgtcttcagttgtctgctggcgatcccggcaacctatatagagaccgcccgcgatcagggggtgactatcctctccgccctgtcgatggagccaggcgcgccgggatggctggcggtgaccggcatcatcgtcgccgtcgtcgctatgtcgaagtcgtttctcggaacctacttcggagtgattgagggcgccagcgaaatcgtcaaaagctcgctgggcctgctgggcgtgcgtaagagccgcgctttcaaccgcgcgatgtcgatcctgctggtctccgccttcacttttgcggtgtgctttatcaacccgaatgcgatctcaatgatctacgctatcagcggaccgcttatcgccatgatcctgtttatcatgcccacgctgtcgacatggctcattccggcgctgaagccgtaccgctcggtgggtaacgccattacgctggtggttggcctgctctgcgtgtcggtgatgttcttcggctaatcccctctggcgacagcggctgcctgagctgctgtcgcacattctgacaatattctcccccttgccttccttgtgagcggattacacttacggcttagccaccgtgaggagagttcttatgtccagtgtcaccttatccggtcgcggcacgctcggcgatcgccaggtctatcgcttaggttacggcgcgatgcaactggccggccccggtgttttcggcccgcccaaagatcctgaagaagcggtgcgcgtactacaggccgccgtcgaggccgggataaaccatatcgatacctctgatttctacggtccacatgtcaccaatcagttgatccgcaaagcgctccacccctaccctgacgatctgtgcattgtcaccaaggtcagcgcccgccgtgacgagaaaggcaactggctaccggccatgtcgcccgccgaactgacccaggccgttgaagacaatttgcgtcacctggggcttgaggtactggaagtggttaatctgcgcagtatgctgagcccgcacggcccggtggagggttcgctggaggcgccactcgccaccctgctggaactgaaagagcgaggattaatccgccatatcggcctcagcaacgtgacggcaaagcaggtcgcggatgcgcagaaaatgacgcccatcgtctgcgtgcaaaacctttataacgttgcccatcgcgccgacgacgcgctggtggatgcgctggccgcccagcacatcgcctgggtgccctttttcccgctgggcggttttacgccgttgcaggcgcaggagttgaacgaggtcgcggcttcgcttgaggcgacgccgatgcaggtcgccctcgcctggctgctccagcgagcgccaaatattctgctgatccccggcacctcctcccgcacgcacctcgcagaaaatattgccgctgctgagctggtcctgcccgcggaagcgctgcgtaccctcgataatatcgccaccgccgcgcgccgctgacctgccagacaaaatggagggaaccctatccctcctcaatatttgcctggaaaaacctcaccgctactggcactatagatcctacaaatggggcgtgatcgacgatcgttctctcattatccccgttaattaaacttaagtttttatccttcgaccggtctccagcttggaggccgttgtcgtttttgtcatgaccaaaattcgaaactcttgattacaggaaatacaatatcaaattccaagtttatacatatcaatctggctgcaaagatagtcaataacatcaaacgctcataaaaacatctgattaacccaatcagaatgttgctattgctataagaaaaatcaaacgcctcacgacaactatttacaagggatgcatatgacagagggaacgataaagaccagtaagtatgaaattattgctattttcagagaggagttgcgcaaacgtactgaaattgaaatattttttaacaacaccagtatcataacccaactgacgcgcgtggactttgccgagtttcatattcagacccatcgcaaaatcccgtccgggcataaaattcgctttctcctgcatagcgattcagggaaaatagagtttaatgcggccctgacaaaacatgacaatagcggtgtcgataaaggtatccgctacgctttttcattgcctgaatgcctgcaggtagtgcagcgtcgccgcgatccccgctttcgtttacgccatgagcatgacttttattgccgcggccgccataaaaacggcgaaaactatcttttcgatatcaaagacatttcagatggcggttgcgcattgatgaccaaaacgccgaatcttaaatttctcagccacaacgccttactgaaaaacgccgtacttatgcttgcagaatatggcgagatcaccatcgacctggtggtcaaaaatgtcattgttatcaccctggataacgctaatgaagagagtgagagctactatcagatatcctgccagtttaagttccgccatctcgatgaccagcgcagaatagagaagatactgctggacctgatcttagaagccaagcgcaaaaagagaatctgacaaccttggacagtatattgctgtacaccaatgacaatctcattggtcactcaatctatcactaccttattgatagccatgaaaatgccacccgtctgagttatgccgatgtcatccatgagaaacatctgccactggcccagacgattattttcaatttaattaataaggatatttctgccatcagaatcgtcgatctgctgaatgcgctccgcctttccctgctgcgctgccagcagccggtgctaatggtgaaaagcgacattgtcgggctgtgcagagagttgataaactttgacaacgctatgattattagcgagaaatctccgctaactcttttttcatctatcgtccagcgcgccaaaggcgtcagcgaactgccgccgcgaggattgcgcaaacagctttcaccacgggagtgtcagatcctcgaactgctcattgccaacaataataataagcgtattgccgccctgctcggcattgctcataaaacggttcatagccaccgcatccatatcatgcaaaaactgggtattgataattcccgcactatgaatcagcgtattgccgctctccatcaatgctaaatgttctcccggtaaatcagtagcggataaagcgtacttattcgctgttgatttacatttcccgccattcccattaatcatcaggtagcctataattaatgtatcctctgcctattgtctgactaacctcgtgaagagggataatgaacactaaaatattcgaagacaacattttatctcgtaatgatatcgctgtacgctacgtctttcagaaaatgttttccccacaaggtactctggtcgcggtggaatgcttaagccgctttgataatctttctatttcccccgaagattttttccgccatgctaccgccgccgttcgtgaacgtatttttctcgaacaactggcactgattgaaaagcataaagcctggtttttacgtaaccatatttccgcaacaattaacgttgatgaccatatcctgaacctgttgcgccagaaggatataaaagccaaagtcgccgccctgacctgcgtccatttcgaggtaaccgaaaacgccgagaatctgctgcataattctcttgccgcctggcagagcccacaggatacctcactgtggctcgacgacttcggctccggctacgcgggaattaacgctattcgcggttatcactttgactatgtgaaaattgataaggattttttctggcacctgatgcgcaaagagtccggccgccagctgatggatgcgctggtgacctttttatcgcgcaaccatcataatgtgattattgaaggtgtggaaagcgaagcccataaagaatggctgcagggaatggagtggtttgctatccagggacattactggcgggaagtcagtattgaacaactggtcgccgatgatattgccatgtaaaaaaagccgggaattcccggctttttaacgtcacttaattataaactaattcccacgttgcccagctggtaatcggcccgctggtggcgcttttcggcgttggcgaaacatagccaacgtaataggtgaacaggccgccgctgaccgcgctttcctgcaaacgcacctgattttgctgcgggtccgccgggacaattttattactcttatccagagtattattatcgttagtcgatagggccagataaatattctgcgctccatccggcaaggtattggccagatacccggcattttcgttaccgaccgccgtcagtaaaaaaccatcgacccagcgcacgctgacccgacgcacctcatcctgcgaggctgccccaccatcatggcgcagctggcagtttgacagtgccagggtaaacggctgcggtttcataaacgccccggccccgcgatcgtggacttccgccaggctgaccggcgccagccagacattaccgctgccggcatgctggccgccgtttagcgcgacgctacaggaaatatccgtcacccgcccggcaaaatcgacccgtccgcgatcgtaattggtctcaaaaccccacgccgagggggcggcgaggctgccgcaaaatagcagccacgcgatagtgtttttcggcaatcccttcattccccctcccgtattaatcgtacgtcaggttaaagatcatatgcgactccacctcgccggtgctggtcgtcgggccatactgataaaaacgcgcgtgcagcggtatggtgatgtagcgggtctcctgattattcaagcggccgacggtgtatttcttattaaactgcagcggggagccatccttcagcacctggatgccaatgcctttcgccatcccgctgccggctttttcattcagcaaggcgcccatggtggcggtagtgctggtggccagggtaccggagaacgaggtgctaatgttggcatatcccgtttcactcaggccgccgctgcactgcaggtcgatattaaaatccttcccgccggcggtggtgccgacccctttcaggtcggtgcgccggatggaacccacatcgacattcatatttttcccgctcagcactgaacaggagggcgagaccacggtgatggcgttggcgctcagataggtttcgaggatcgggttaccgccgctctcccagtcgtaggaggtgtacttacccgccgccagggtgccgctgccggtggttgccgcggttttgataatctccagcgtaaagcgcgacccttcgagggaatagttggtggtgttatatacccgggacgaaaagacgtcgggatagacgatatttaccgttgcgccgccgcggctgaaacgcatgccgattcccggcacgttggtggagtagattttatttccaaggtccgtggcccctggcgacacgatcttcgccgcaaagcggttggtgccggaagtacagcgatagcttgccccgccgggagcgctcatcgtccagtcgcgggtaaggatcaccgagcccaccggcagatccgggggcaccaccaccctgcccaccaccatgtccagcatcaccgttggcgatgagagacgcgtacaggaggcccaggacgaggtggttcccagcgccattaagacgataaaaagcgttagtaatttcctcagcgacatacgctatcctttgttgtttgctgtcccagatccaccgaacactgcccgccgctccacttcacaatcgcgcgtttggcgttcgcatcgctgataaacatcatgctgccctggccgacaacgccgatctccttgccgtcgggggagaaaatacttgccgcaaacggcaacggctcgtggttcgcctggcgcgcctgcagggtgaggttgttctgcaccttagtgccgaacgcgaccttaaccacgctgccttcccacggcacaacctgcgccacggtgcgatcgaaggccacgtcgtcatggctgcctttcgggtcgatttccacggcgttaatccggtacgggcgcagatacggcaggatggcgtaaccattgctgtccacacgggtgcccggcgatcccggaagcatcgccccggccgcgtctttggcttcaatcagggccatcgtcgagccgctttccggtgagagcaccacgccgccgctgtgggcgatcatcgtcccgctggcgccaatgccgctctgacgatagccttcgccctggctgtagctgccgttgagggtggtccatggcgtacggtagctgccgttgagcgccacatcatgctgaccgccggtggcggtggtggtcgacacgccgtagttaaggttgttttcactgtccagcgaaccgttgataccaatctgcgagctggcaaagcgcgagttattgaacgaggtgttcgacgtcaggttggcggtgcggttatcgccaaaccacagcgggtagctgaagttgagtgaaatacgatcgtcgcgacgatgaccggagctgtctggcgtatagacgcgctgcgcgctcgccgaccaggagagacgaccaaatgaattgttgtagctgacctgatactgcttctcggtcccggagcggttccagtaatcggagatacggccgctgagataaaacccgccccagccgtccggcaggttctggttcaccgtgaaggtcatgccgtttttttgccgccacagggtgtagttgctgcgactatttttttcctgatcgacggcgtacagcgcgtcgttgaggttgtaataacctttcgtcgagtagcgatacgccgccaacacgatgctggtctgggtatcggtaaacatgcggttaaaggtcgcgcgatagctctgacccgagtcatcatgggcatcgctcttcaaccgcgaatgggtgacgtcaaaagagagcgcgccgatgccggtgttcatccctgtccccaccaggaaggcctgatagtcgtcaaaaccggtgaccccggtgtagccggtcaacagattgttgatcccgtgctgccaggtcgcctgatagagcatcggcttgttgcgcagcgcgctgtcgtccactttaccggcggagagcgcgtagcgggtcattcccggacgcagcagctgggcgacggaagcgtaaggcacgctaaacacttctaccgagccatccgcttctttcaccgagacctcaagatcgctgccatagccggaaggatagacatcctgcagggtaaatggtccgggcggaacggtggtctgatagataatattgctgccctggcgcacggtgacgagggcgttgctctgcgccacgccgcgaatttccggagcatacgagcgcatgccgtccgggaacatattgtcatcggtggaaagattaaccccgcgcagaccgatggtgtcgaaaaattcaccattggtgaaaatctgcccgccgctgacgatggagttgagctgtgggatagggcgctggagataggtctggttgctgttccagtgcgctttaccctgctgctgctgccagttcaggttgccgatgtgcttcagcagccagccgtcccacgacagaccggcgttgacgcccagataggcgctgctgttatccgacccgcctaccgaagaggtatggctgttccaggcgttcgccatccagccaagattgagcgcggtaatacctttgtcccagaactccgggctgacatagtttttcaggcgttgatcttcatagatctgcggtaccgaaatgttcaaccgcagggaggactggaccaggttgtctttgacgttttcttcgttgcgccaggatttgaggctaccgcagtagccctcctgctcgctcagctgcggattgagcttttccgccgcgatgccatattgggccagcatcgctttggtgtagcagacgcccagccgaccatctttatcgcgcgcgatgcgtaaatcgtagcgccctttccactcgtcgttggtgtagacgtcaagggagtaagtgccttcggtaatcgcgctggtcgaaaagcgcgacagatcgaccttttcgcgactgccgacaataaagccgtcgttaaactgatataccgttcccgggttttcctgtccgctggaaaatggcggaaagcagcacagcgcgatggcgatcgcggtgcttaatcttcccgggcagaatgacctctgcttcattagcttttcccttatttaacggccactttcactgcgacatcggcgccatagtcattaatgttgttaacggtcagggtttcgccgcggttgacggcggaggagagcgccaccgtctggctggactgcggcgccagcatcacggttttgctgttcagggctttaccgccgtcgcgggaaatacggctgacggtaatgtagaacggcgtcgggttgttgatggcgagactactgccgctggcggtcagggtcagcttctcggccgccgcatcgcggttgcccagtccggcaggacgataaataaatttaaagcgcgaacggatcgccagctgcagcacgttctggccttcatttttctgattggccaccactggcggaatttccagcagattcagccaccacagcgtctctttatctttcgccagaccggcgctgctaccgagcttaatacgcagcgtctggccgctcttggcgtcaacgcgcgaaatcggcggggtgataataaacggggtggtaatggtatccggtgtggcatcggcatcgccgttatccagccaggcctgcgccagcgccggacggtcggcgttatttgaaagctgtaccgttatttctttttcatttcctggataaataaagcgggtaccgttaacaataatattgttggcatgggccgcaaaactaaaaatgaaacagaaaaaaagggcaatacgcttcatgctgacctcagaataaaaatacaagcggcggacattgccgctttattattgttattaactgccccatcgcggggcagttttattttctgacggaattactggtaagtaatttcgtaagtcgcgtagctgttaaccacaccggtggttaccgtggtcggcgcgctggtggcgtagcctacgtagtaggtgaaacgcgcgccatcagctacagcggaagcgtcgcctttcgctttcggctgagtgctgtcacccgggatgattttgttggtcagcgcggtagcgttgtcagtagacagcaccagctggatgttctgagcaccggaagcttcggtgttcgccaggtagccctgttgtttgctggttgcgccagccagcaggttaccgccggtccagttcacgcccagtttgcttacgtcatcctgtttagtgccatcagcagcctggcagttagagacgtcaatggtgaaagatttcggtttcaggtaagtatccgctgctgccgctttaacttcagtcagggttaccggagacaggtaaacgttcgcatcgctgccctggccgttaacggaaacagtacaggatacatcggtaactttaccgaagaaattaacctggccgccgccaacattggtatcagctgcatgggcagcagtcatgccaaaaaacgcggttgccattgctgcagagagaagaacctttttcattgccatttccttgtcagagtgaattacgaatcaatgagcacactgtgaattcgcatagaaccagaaacatcaggcgatgctgatttatgccactgctaatagaatcttcgactgaccgggagccgcaatatttaaggcgtcaggtaacgaacctaaaaatataagttcgctggtgctatcggcgtcaaagaatgctatttattcgccgacaaatatacatttgttcacgtttcattaagttatataacagataaccatcggctattaataaacagtcattgatagatgaaaacgcgagggtggttgtttacagcgcagcaagcctaacgccagagcgagagacagtgaccgcaacagcatgcagaaaaagccctcggaaggccatcgcgataagtctgaatctgcctttgcggtggtgaaaacagcaccaaacaattcacacaacgaatgatgaaagcatgaatgaggcgcattcctctccctgaacaagggcagcccatgtgatccccctttcagaagtaaatcattaattcattgtttttaaattaaaaaatagataaacgatcatgtttacgccatcaaaccgccataaaaatgtgatctaaatcgcactttttgccacgcgcgttatagttagcagacttattataagtccatcgaaagcaaacatgctttccaccataaaagttaaaaggacaaacaccatgaaaaacgtaaaattactcgccgctgccggtatgctctccctggtctctttcgctagcttcgctcatccggtgagcgtgacagcagacaccctggacagcgcagaagcgaaaatcgcaaccattgcgaaagaacaaggcgcttcctaccacatcaccgaagcctataccggcaaccaggtccatatgaccgccgagctgtctaaataagcgaatggttgcagagggagctgccggacaggccgcctgcgggtggctggtctggctcccgccgctcaccccgcacgcagcaatgtcgagccccgttacggggcttttttcgtttttgctcccgccgcctgacgcgccagcgcgcgctggatagacatcacgctcgccagcaccacgatcaatcccatcagcgccatcccctggatcttttgtccgaggaatatccatcccagtaccacggcggtcaccgggctcagcagactcatcgccgacacggccaccggtgagaggcggccaatcccccgaaaccacaggccataggccagcatggcgcccgccaggcacagccacagatagccggccgcctgcagcactgttacctgatgcaaaggagggtcaacgatcagcgccaccggggtcagcaccactccaccgatcgtcagctgccagccggtcagcgcgacgatcggcagggagagcgcccagcgccgggagagccaggtgcccagcgccatactgatcgccccgagaaacgccgcgccgatgcccagcgggtcgaggacggtgtgcggcgacagcagcagcatggccataccgagtatgccggcgatggcggagaacaccgccagccagggcgagcgctgccggtcgacgcaccaggcgaggagcatcaccagcagcggctggatcgcgccgatcaccgccgccagcccgccgggtaagcgataggcggcgataaacaacagcgcctgaaacgcgccgatatttaagatgccggtaacgatcagctttgcccattcgccgcgctgcggaaaacgacggctccagatcagcagggcgatacctgccggcagcaccctcagcagcgcagcaataaatgggcggtcaggaggaagaagctgggaggtgacgatgtaggtcgtcccccagatagcgggcgccagcgcggtgagcagcaggtcgagaatcagattacgtgagagaaaagccatgattttatcttcacttcaaggtaaattagtgagtgaagtatgtaccgccaagtatcttgatatcaagacaagtgagcactaatggacaaatcaccgccgatcgacgccgtggatcgcatcctcgcccagtggcagcgggagcggccagacctcgactgcagccccatggggccgataggtcgcctgaaacgatgcgctatgctgctggagccgcaggtggaagtggcctttacgcgccacgatctggtgcgctgggagtttgacatgctggcgacgctgcggcgcgccggggcgcctttcgtactttcgcccacccagctcttctccacgctgatgattacctccggcaccatgacccatcgtctgaaggcgctggagaaacgcgggtttattacccgcctgcccaatccggaggatgcccgcagtatgctggtcgccctgacccctgccggacgcgaacggatcgatgccgcagtggaaacccacgtcgacaacgaacggcaactgctggcaggactcagtgacggtgaacgccagcagttggatcaggcgctgcgggtgttgatgcgactgctggaaacgggctaacagccagcggcgataaagtcgccgttggcgctgatcggcaccacgctgaaaaacaatcccacggcaaagaggatcagcgccagaccgccgaggatcttcatcagcggaaccagccagggccgcgggcggtgattcgtggccaatcgtttgaccgtccgatggcgcgcatagtgaaccagtagcgacagaccgaggatcgagagcgcggtgcccagcgccatgctcatcaccgcggcgatgccccagctaacaatccccaacgcgttggcgaataataaaatcatgatcgccccgctacagggccgaacgccgatagccagcaccacgccaaggcgcgtcttccagtcagcgccctgcagatcctgccccacgccgtgatggccgcagccgcacgaggcgtcatgctgatgcgctggcgtcagacggcgaatcacctgttttgccggccacaggctttgcagagcgcgaaagataacataagccccaaagacgccgatggtcagggcgctgatcttctcgacgtaccagcggctggcgctaagatcgccggcggccagattcagccccaccgcaagaataaagacgaagagtatcgcagtgacgccctgcaacaggctgccgagaaagggcaccacccgcgccgccgtcaggctctcctgattggtgctcaggtaggtcgtcacgataaatttaccgtgtcccggtccgacggcgtgcagcacgccatagagaaaggcccccaccagcagccagataccgccgctgtactgatggttattcagcaacagaaggtacatcaccagatagcgatgcagggtaatttgggtggcgagacaccactggagaaagtcaccccagtggctgtgcaaggtgatagcggcggccagcagtagaaggccgccgcacccggccgccagcaggcgccagtcgcggagcgcaatcggagtcgtcatcgttataccattgtagtaaacgtaaaccgcctgacagcaactttacgacaggcgagcgaaggtgtcagcgcttaagggtgaggaatttgtcgaagctgttcacgggattgtacgtagtcaccaggctccgcattatctaccgatcgctatcttcccgacaccgtattagcgcagaatgcctcaatatcttgagcataccacagctatatctttttatgcgttattggttaccaataccttttaacaggaataattactcaaaaaatcacagataaaaataaataagttatttcttggcgagcattttttgtcagttattatgctgcgcttccggcaagaatattctttaactgctatttattgtactcttcagcaggatcacttccatgaaaagaggcttacttaccctggttactgctgccatcgctttccgtacaggccacctggcgcagcgacaagcgccaggaggcacgtgacgaaaagtggtgaaccggcaggcttcggcgtatcctggatgtgagtccttcccgcgccgaagcgagcattccaacccgccgccagaccgtgtcgcaatacttacctgtcctctatacctcccattgatatcttcctgtatacgttgaccgtgacgagttttcatctcattcaaccgcatgtaccagattaagcttacccgttgaaatacggcgtaatgtgctctattacagacaatgctattatcaccaggctttttgcagtatggtttaatcactgttgtagttttgcagtgaatgctatccagacgacttaaggttgtattttgtctgagaaatttctcatgccattcccgaaggttgtcggcgagggaggctggtttactggggtgacattgcccagtaaacaggcaatcaatcatgacggcattgatagccgccttgccgtggccggaagcccaagccttcatcatcatgcgggtatcatcaagaggatcagggatgtacaggacgtggaaacccccaggaaagattcatcagttcagccagctcaccctttctttacccttcagatcgcggcctcttatcgttagcaatggagctagcccatgataccgctcgcgctcgtagcaaattaaaacgttatcaccacgctgtttcaaaataaaaaggcagtcaaatttaacaatgacctgacgcaggctcggaaaaccaaaaatatgcctgcaataaaagggaaaaccatgacgaataacgccgacataaaaaaaaggaacttcctgactcagaatgaaattgagtctttacttaaagcggccgataccggtccttatgctgcacgtaattattgcctgacgttactgtgcttcatccatggtctgcgcgccagcgagatctgtcgtctacgaatatcggatatcgaccttgctgcccgatgtgtttacatccatcggcttaaaaaagggttttcgactacccacccgttgctggataaagagatctacgccctaaagcgctggctggccattcgcagcagctggccgcaggccgccagcgaatggctgtttctctcccgcaaaggtaatcccctttcccgccaacagttttatcagattatcgcgtcctcagggggactggcggggctgccactggagatccacccgcacatgctgcggcactcctgtggctttgcgttggcgaatatggggatcgatacccgcttgattcaggattatctcgggcatcgcaatatccgccacaccgtctggtataccgccagcaatgcgggacgcttctatggcatctgggacaatccccgtgacaaacagcgatcgtcgctgatccaatagccttgacgccatggatggcgttgtatcgcgagcggtcgacaaattaaaatattcatgattattaaccctgcgttaattaggattactgttcccacaagttcttatttaatccttatgactgagagttaatataaccctgcgyttactcaggaataagactgggtatttattggtgggaaaaaatttccgcggctgtgtttttaataacggctggtagtgaaaaatatcctttcattttatatacctggcggcaacccgcacagatactattgagccgatgattaaaatctttaaaattaagaattatcacccgacgatatttttagtgtctggcaatgtaatatgttatcaattcatgattaatcatcttcaccctgtaccgttttagcattacagaacctatttcgtcatggcgtatggtttcgctgtgacggtcattcatacctattttcaggagcaactattgtgaaccgacgtcgttttctaaccgccaaagaagttcaggccatgatgcaggctgctcgtcagggccctaccggcgaacgggactactgcctcattctgctggcctttcgccatggcatgcgcattagcgaactgctggatctgcattatcacgatctggatctccatgaagggcgggttaatgtgcggcgattaaagaatggtttttcgacgattcatccactgcgttttgatgagcgcgaggcgattgagcgctggagcctggtccgtgccggctggaaagcggcggacaaaacggacgcactgtttatctcccgccgcggcaccgcgctctcccgccagcaggcgtatcgtattattcgctccgccggggaaaatgcgggtaccgtcacgcacactcacccccatatgctgcgtcacgcctgcggctatgaactggctgaaagagggacagatacgcgtttgatacaggattatctaggacatcgcaatattcgtcatacagtacgttacaccgccagtaatgcggcacgtttcgctggcatctgggaaagaaataatcttttagaggaaaaagaccagaagacgaaaaatgaaataactgattgattttaaataattaaaaaaataacgaacaggtcaattggggccaaactgtttatatcataaaaatgttttgacatattttgcaactcactgcgccatatttccgcaaaaaaaatcatatctaattgattattatctatttttaaacctgcaattactcaattttctctaaccatatctctgctgcaccggcgatccgtcgccaacgccatcgcttttcctttcgcaccccctcccaccacaccagattatattaccataaaaaccaaatttggcagaatttaaaaccacagaatacccaattgacacaaaatacagatcatttatcccaacgagtcaaaatggccccaattgtctcatcggttgggcgaaaactgtgcagagccggcagccggaccactcggctgaaatctgaaatgcctggaaggcacaacggctgccaatccggttcgttatttcgacatcgttcaaaggaaaacagtatgaaaatcaaaacactggcaatgattgttgtgtcagccctgtcactgagctccacggcagctctggccgataccaccacggtcaacggcgggaccgtgcattttaaaggagaagtcgttaatgcggcctgtgcggtggatgccggctctatcgatcaaaccgttcagttaggccaggtgcgttccgcgaaactggccacggcggggagcaccagttcggccgtcggtttcaacatccagctggatgattgcgacactacggtagccaccaaagcgtccgtcgccttcgccggtacggccatcgacagcagcaataccaccgttctggccctgcaaaactctgccgccggcagcgcaaccaacgtcggcgtgcagatcctcgacaataccggtacgccactggcactggacggcgccaccttcagtgctgcgaccacgctgaatgacggccccaacatcatcccgttccaggcacgttactacgcgaccggcgcagcgacggctggtatagcgaacgcggatgccacgttcaaagtgcagtacgagtaagacccgagtcaggcagggaagctattcgggccaggagggcccgctctctattttcaaccggagtgaaacgatgcagggaatgaaatctggtctgctgctgctactgcctccgctggcgctggccggtaatcattggaacgtcacgctgccgggggcagcatgcgttttcagggcctgattatggcgagctcctgccgcgtcgaagccggcgatcggcagatgacggtcaatctggggcagatcagcagtaatcgatttcatgctgtcggcgaagacagcaacccaatccctttcgcgattcatttacaggattgcagtacggcggtcagccagcatgtgggggtgacctttcacggcgtggctgatggaaaaaaccccgacgtgctgtcggtgggtgaaggtccggggatcgccagtgggatcggtattgcgctattcgacagccagggccagcagctcccgctcaatcgtccaacggatcgctggatatcactctaccgcggaccgacgacgctaaatttcgtcgccaaatatcgggcgaccggacgccaggtcaccggcggtgcagccaatgcccaggcctggttctcattgacctatcagtaattaatccgcagacaaacaggacaacacggtgagcagacaaggagataatgtgagaaaaacggcaacgatggcgcatggcttactggcaggatgtgtgcttttcgccgccagtatctttagcgccagcgcgcaggcgggcgttgcgcttggcgcgacccgggttatctacccggcgggacagaagcaggtccagctcgcggtgaccaataatgatgacaacagtacctggcttattcagtcatgggtggaaaatgcagatggtcagcgagacggccggtttgtcatcactcctccgctgtttgccatgcagggtaaaaaagagaacaccctgcgcattatcgacgccaccaataaccagctgccgcaggatcgggaaagtctgttctggatgaacgtgaaggcgatcccttcgatggataaatcaaagctcagcgacaataccctgcagctggcgattatcagccgcatcaagctctactaccgtccgggaaaactggccctgcctccggatcaagcggcggaaaagctgacctttagccgtagcggatcgtcgctgacgctgacgaaccccaccccctattacctgacggtgaccgaactgaacgccgggacacgcattctggagaacgccctcgtaccgccgatgggcaaaaccagcgtcaagctacccgcggatgccgggaacaccatcacctatcgcacgattaatgattacggcgcgctgacgccgaaaatgaatggcgtgctgcgctaacccagaagcgccccgccgcgcgggacacgctgcgcatgaccagaagcaatgacagccgggcaacgtcggaccggagggataatgtcacatcggaaatatggactggatcatttaggttgccgaactgcccggcgcctggtatctccggcgctggcgctgtggctctgctcacagccgtttgccgcgcgggcggacctctattttaacccccgctttttagctgacgatccggcggcggtggctgacctgtcgggatttgaaaaaggccaggaggttccgccaggcacctatcgcgtcgatatttatctcaacaatggttttatgaccacccgggacgtcaccttccaggccgatgcccagggtcacggtctgtccccctgcctgacacgcggccagctggcgagcatgggtgtggataccggtcgggtgccgggcatggcgacgctggacagcacggcctgcgtgccgctgaccacgcttatcagcgaagctaccacgcgcttcgacgtcggacagcagcgcctgtacctcaccgtcccccaggcatttatgggtaaccatgcgcgcggctatattccgccggagctgtgggataacggtatcaccgccgggctgataaactataacttcacgggcaataacgcccataacaccacaggtggcagcagccgttacgcctatctgaatctacagagcggcctgaacattggcgcctggcgtctgcgcgataacagcacctggagctacagcagcggcggtagcacctcatccaacgagaatcgctggcagcacgttaacagctggcttgagcgggacatcacgcctctgcgttcgcgactcaccctaggggacagctacaccaacggcgatgtcttcgacgggatcaacttccgcggcgcccagctggcctccgacgacaatatgctaccggacagccagaaaggctttgcgccggtgatccacgggatcgcccgcggcacggcgcaggtgtcaatcaggcaaaacggctacgaaatctaccagagcacagtgccgccgggaccatttaccatcgacgatctctacgccgcgggcaatggcggcgatctgcaggtcacgatcaaagaagcggatggctcccgccaggtcttcagcgtgccctggtcaacggtgccggttctccagcgtgaaggccatacccgcttcgccctcaccgccggggagtaccgcagcggcaacagtcagcaggaaacgcccgattttttccagggcacggccatgcatggcctgccggcaggctggacgctctacggcggcacccagctggcagaccgctatcgcgcctttaaccttggggtggggaaaaacatgggctatttcggcgccctgtcgctggatatcactcaggccaacgccaccctggctgacgacagcgaacatcaggggcagtcggtgcgttttctctataacaaatccctggatgagaccggcaccaacctgcagctggtgggctaccgctactctacccgcggctattataactttgccgataccacttaccgccggatgagcggctacagtgtggaaacccaggacggcgttatccaggtaaaaccgaaatttaccgactactacaatctggcttacagcaagcgcggcaaggtgcagctgagcgtgactcagcagttggggcgcaccgccaccctctatctcagcggtagccaccagacctactggggcaccgacgatgccgatgagcagctgcaggccggcctcaacgccgccgtggacgatatcaactggtcgctaagctacagcctgacaaaaaacgcctggcagcaggggcgcgatcaaatgctggcgatcaatatcaatatccccttcagccactggctgcgttccgacagccgctcggtctggcggcacgccagcgccagctacagcctgtcgcacgatctcaatggccgcatgaccaatctggcgggcctgtacggcaccctgctggaagacaacaacctcagctatagcgtgcagaccggctatgccggcggcggcaacggcgacaacgggagcacaggctacaccgccctcaactaccgcggcggctacggcaacgccaacgtcggctacagccgcagcgatggctttaaacagctctattacggggtcagcggcggcgtgctggcgcacgccaacggcatcaccctgagccaaccgttaaacgataccgtggtgctggtgaaagcccccggcgccggcggcgtgaaagtggaaaaccagaccggggtacgcaccgactggcgcgggtatgccgtcctgccttatgccactgagtatcgtgaaaaccggatcgcgctggataccaacaccctggcggacaatgtcgaccttgacgatgcggtggtcagcgtggtgcccacccatggggcgattgtccgcgccaactttaacgcccaggtggggatgaagatcctgatgacgctgacccatcgcggcaaaccggtgccgtttggcgccctcgccaccggcgacagcaaccagagcggcagcatcgtcgcggacaacggccaggtctacctgagcgggatgccgctggcgggcaaagtgcgggtgaaatggggcgatggcccggacgctcagtgcgtggccgattaccgtctgccgccggagagccagcagcaggcgctcagtcagctttcggtcgcgtgccgctaaggagattatgatgagaacactgcagtatctgctgggcgccctgttcaccctgggcgcaccggctgcgcttgccgccgatagcacgatcgccatcagcggctatgtccgcgataacgcctgcgcggtagccggcgaatcgaaggattttactgtcgatttacaggataacgccgcgaagcagttttatgccgttggggcgacgacgccgccggtgccgttccgcatcgtgctgtcgccctgcggcacttccgtcaccgcggtgaaggtcggtttcaccggcgtggcggacagcatcaacaccagcctgttaaaactcgatgccgggacctcggcggcggcaggaatgggggtggaaattctcgatcagcagcagtcccggctgccggtcaatgcgccgtcatctaccatgacctggaccacgctgaccccgggccagaccaatattctcaacttttacgcccggctgatggccactcaggtgcccgtcaccgccgggcatgtcaatgcgacagcaacattcaccctggaatttcagtaagcggaggctgaaatgaaatggactcatgtgggctggctgctggccggcctgttaaccgcgagcgcttccctgcgggcggccgacgtcactctcaccgtcaacggcaaggtggtggccagaccctgcacggtttccaccgtcaatgccaccgtcgagctgggcgatctctatacctttagcctgatcggtgcgggctcggcatcggcctggcacagcgtggcgctggatctgagcaactgccccgtgggtacttcacgggtgaaagccaccttcagcggaacggcggacagcaccggctattacaaaaaccagggaacggcgggcaatattcagctcgaactgcagaacgaggacggcaccacgctgaacaatggcagcagccagtcggtacaggtggatgaggccagccagtccgctcgcttcccgctgcaggtcagggcgctgtccgtcaacggcggcgccacgcaaggcaccattcaggcggtgattaacgtcacctatacctacgcctgagccaggagagcatcatgatgaaaaaaataatccccctgttcaccaccctgctgctgctgggctggtcgatgaacgcctggtcttttgcctgcaaaacggccaccggggcgacgattcccatcggcggcgggtcagccaacgtctacgttaacctgaccccggcggtgaacgtcgggcaaaacctggtggtcgacctctccacgcagattttttgccataacgactatccggaaacgatcaccgactacgtgaccctgcagcgcggatccgcctatggcggtgtgctgtcgagtttttcaggcaccgtgaaatataacggcacctcttacccgttcccgaccaccacggaaaccgcgcgggtgatttatgattcacggaccgataaaccctggccggccgtcctgtatctgacgccggtgagcactgccggtggagtggccatcaccgcaggatcgttaatcgcggtgctgatcctgcatcagaccaacaactacaatagcgactccttccagttcatctggaacatttacgccaacaacgacgtggtggtccccaccggcggctgcgacgtctccgcccgcgatgtcaccgtcaccctccccgactacccgggatcgatggccgtgccgctcaccgtccactgcgcgcaaagccagcagctggggtattacctctccggcaccaccgcggacagcgccaacgcgatcttcaccaataccgcctccgcctcgccggcgcaggggataggcgttcagctgacgcgcaacggcagcgccgtcccggcgaacagcacggtctcgctgggcaccgtcggcacctcgccggtcaacctcggcctgacggccacctatgcccggaccacaggccaggttaccgccggcaacgtgcagtcgatcatcggcatcacctttgtctatcaatgatgaccgattatatcctctcgccctgctcgctggccgcccgcgggttgagccagctgatgctgaacgccgcgaagcggcccgttgagctgccggtcgagggcgtgtccctgcgcgagctggccgccgtgaagcggatcgtggtgtatctccctgacgatcccctgtggatgctcaccacgctgcgccaggcggcaaggctactcgacgaggccttgccgccgttaccgatgttgattctgagccgcagcccggccatctggctgtggcaaacgctgctctatcaggtgagtcatccggatcgtctgcgcaacgtccatactgcccccgccgatctgtcctgcgcggagctggcccatcggctggagaatgcgccgcggcttgagcggcttgccagcgaagccgccctgatccacggaaaacgggtcgtcgggttgacccacgccgagctcaaggtgatcctcgccctgctgcaagggcagacgataggcgagcaggcccaacgtctcggattgagccagaaaacgctctacacccaacggctggctggggtgaaaaagctggtggaatgtcatccgcatctggccccccgctttccgcgcacgctgctgccgcgctcacccgcaaacgcactgacggcgtttgaacaggaatgggtacaagcgattcacgatcgccaggtcttcccggtttttcaacctatcgtcgatagtcgctcacagctacagggggtggagatcctgatccgctggcgccaccgcggccaggtacttcacccccagacctttctgccgcacttccgcgccgactacacctggctgctgcttacggcctttgttctgcaggaggccgtgcagaatattaatgagtatccaggcgccttctatttttcggtcaacataccctcctcactcgccgacagtgacagcctgctgcggatggtggaagccgctcgccagcagcttcggcagccagagggcgtggcaaggctggtgctggaatatgctgaaactatcgattttcgccatcagagccgctccgccgcccacgtggcgcagctgcaacgtgctggcgtgcgcgtgatgctggacgactgcttttctcaggggagcgttatctttccggcgcgtcgactgcacttcaatgcgtataaactggatatgagcatcgtcaatgacgcccagcacgatccaaaggcgcttgcgctaataaaaagcctggcctactactgccagttgagcggcagccgctgtgtggcggaaggggtggattcactggcgaaatttacgcagttaaaatcgctggggattgatcgcttccagggctatctgttttcaccaccgatgcggcgcgaacatctcccggatctgatccgccgcttttcccaccagcgcgatccggcgaaacgttgagggtgcgagaaaagcgcaccggttagcaccggtgccggtacgtcatgcgcgaatatcgtcgtattcgcgggtgttatcgaattcatgtttggcaaacgggcagagagggataatcttccgttgctcctggcgcattttttccactaccttcgccaccagctgtttccccacgccctggcctttcaggctgggatcaacatcggtatgttcgataatgctgaggtgttcgccggtgggaacaaaaacaatctccgccacctggtttccctgcgcgtcgttaacataaaatttgttatgcccttccagtatttccatcttctcctcgcttatttatgacgatattgcagagcgccgctcgggcaggtatcaatcacgtttaccaccgtcgcgacatccacttcatccgggataatccacggcttacgcttcaggttgaagagcttcgcgctgccgcgcacgcagttcccggaatgctgacagatcgccgtattaaagtagacgtcgattttctccccggtgtaggcccggtagccggcttccagtaattccttatccatgacattgcctcggtcgtttttatctttcaggctaagcatagccctcgccgtggcggctgactatgcgcaagcgcgggaattgacgcctcacatcatgctctcccatcgcgcaaggatcccgcagtcaacgatcggttgactttcattcccgcaacgaggcgattacactcatgacacactggtatgatcactcagggatgttccattgaatcatattgccaccatcgcccgcccggcgcggttactgctcgtcttgccgctttccggctgctcactttcgccagagatcccggtattgggcgctgcttttcccggctggtttttctgcttactgggcggtgcgtttttactgatcccctgccatatcctgattacccgtaaaggctggcagccgcgcttttctcccctggtcttcagctacgtcgcgctgatgttcctgttcgccacgttgctgtggtttctgttttttgttcactgatcgcttatgacaacttcccgcactcccctgttacgcaaaaagtggcctctgctggcgctggtccttgccgccatcctggcgctgatcctcgttatctggcagttgcaaacctcgccggagaccaatgacgcctatgtctatgccgataccatcgatgtagtgcccgaggtcagcggacgcatcgtggagatgcccattcgcgataaccagcgggtgagaaaaggcgatctgttgttccgcatcgacccccgcccctatcaggcaatgctcgatgacgcgaaagcccggctgacgaccctcgacgcgcagatcatgctgacccagcgcaccatcaaagcgcaagagtataacgcccagtcggtggcggccgccgtcgagcgcgccagagcgctggttaagcagaccacctccacgcgtatccgccttgagccgctggtgccgcaggggttcgcttcccaggaagatctcgatcaggcgcgcaccgctgagaaagcggcgcgggcagagctggaggccacgctgctgcaggccaaacaggcctcggcggccgtgaccggcgtggatgccatggtggcgcaacgcgccggggtcctggcgcaaatcgccctcgctgaactgcatctggaatttaccgaagtacgcgcgccgttcaacggcgtggtggtggcgctgaaaaccaccgtcggccagtacgcctcggcgctgaagccggtcttcaccctgctggatgacgaccgctggtatgtgatcgcgaacttccgcgaaaccgacctgaacaacgtgcgccccggcgtggcggcgcggatcaccgtgatgaccaaccacaaccggacctttaacggggtggtggattcggtcggctccggagtcctgcccgaaggtgggagcgtcatcgaagggctgccgctgatccagaaaagcattaactgggtccacgtctcgcagcgcttcccggtgaaaatcgccgtcagcgatcccgacccggaactgttccgcatgggcgcctcggccagcgccgtgctgcagccgtagccgggcgacgctatgtttcctctcgcccattttttacgccaggaactgcgcgacgcgccgggacgcgccagctacacgctgcgcctgacgctaagctgcgcggtgctcatcaccctgtttatgaccctgcagatccctttcctggccgttgcgctgatcgtcgtgttctacgtcagccagcctaacgtgttgatgattaagctggtcagcgtggtcttttttgtcaccgtcaccgtggcgctcggcggcgtgctgctgatcatcaagtggacctatgactacccgctgatccgcctggcagcctccgtggcgctctttttctgcgccctctatctgatgcgggtgctgggcaagctgggactggcctttttcgtggtggcgctggcggtgatttacgctcagaccttcccgtcgatgaccagccagagcgagatcctggtgcggctgctgctttggctgtgggtggcgattaacaccgcgatcctcgtcaccctgctggttaacgcctgctttcagcaggcctttcccggtaaccagtttaaggcgcgtctggccgggatgctgcacgaggtcgcccggcggctggcggccccggacgctgaagcgccaccgaccttcggcgagaccgccgcgcagttcaatcagctgcagtcgctattcacccaggccagccgggcgacaccggagatcgccgccgatccccaggcctggcgctcgcggctggccgccactttgcgctgctaccagctggcggccctgctgcaagcagacgaggcggatagtgacgatcgccagcagctgtcgcaggcggtacttcagctgaagaacgcccttagcgaggggccgtttgacggcgctattcctcccctgacgctcagcggtcgcggcgtcaatcgcgctgttctgcaggagatggctaccactctgcagcggctggcgcagggtgagccggttgccctgccgcagggtgaggtggagaaggcgcccctactggcgccggacgcctggcgcaacccggcatatctccattttgcgctcaagaccctgctggcgaccctaatctgctatgtcttctataccgctgccgactggcagggtctacataccattatgctgagctgcgtgatcgtcgcccagcccgggctgggcgccacgatgcaaaagacatggctgcgcatcggcggggcgctgctcgcctccctgctggcgctgctgttaatcgtctttgtccagccctggaccgattcgctgacgggcctgctggcgatgtccctgccggtgctggcgctggcggcgtggattgccgccggctcggagcgtatcgcctacgccgggatccagattggtttcacctttgcgctggcctttctcagctggtttgctccgctgacgaacctcaccgagctgcgggatcgggtgctgggcatcctgctcggggtgctggtctcctccattgttcatttgtatctctggccggacagcgaagcgccgcagctgaaaacccgccttgcggcactttatcgccggctggcggactgcctcgccgccccgaaggaggcggttccgctggctcccctgcttgtcgccttcaccgacagcgaagcgctgctccaccgggttcgcgccgaaccgctgggcacgtatgctcacccctggccccaggcgaaaggctggccgatgcgcgccaccctcgcccaggccgaggagatcgcccgcctcagcgaaggctaccgactcaacgccgcgccgggagacccgaccctggcccgctgcgccgaacagctgcggcgctacgctgaacgtatcgaacaggaggcgacggcgcctggcgaacagctgaccgccgacctgactaacccctttggcccggcgctggccgccgcgctggccgccctgcccgactgggggccgacaccgatagcgactgagcaacaggctaaaacgtcatgatgatccttcctttctccgcgcgcctgcgcggcactctttttaccctgacgctgacgttgctcagcggctgcgcgctgatccaggatgagcctgcccaggtcgccatcgtcaatccgcagcaggcccagctggcgcaggtgatccacctggcgaacagcgactggccggccgcccgctggtgggaggcctatgatgatcctcagctcaatatgctgatcaaccgggcgctgcagaactcgccgaccatgcaggccgcccggctgcgcatctcccagtcgcagtccacggtggaactcgcccggtcggcgatgggcctgcaggccaccgccgtcgcggcgcaaaaccgcctgcggatcaccgacaaatcctttagctggccctactcatactccctgccggtggataaaaacggcccctggtatacgctgaataccgttggcgtcggggcgcagctgaatatcgatctctggggggccgatcgcgcccgggtcgccgccgctattggcgagaaaaacgcccggctggcggagaccgccggcattgagctcgacatcgccagcagcgtggcgcagctctatttcgccatgcaggcgacgttccagaaaatcgcgctgctgcaggagctggagggcattgcccgattctcggtggaagcccacgagcaccggacccggcgcggcctggaagacagtgtggatgtggccaacgcccaggccgaacagctcgccgctcgccagcagatcattagcgccgaggggatgctgacccagtatcgtgaaaccctgcgggcgcttatcggcgccgatgcgcagagcatgccggccatccatccggtggcgctgccggcgctccaggagacgctgccgccgtcgctctctttcgagctgctggcccgccgtccggacctgcaggcgctgcgcggctacgtcaccgcctccctgagccaggtcgatgcggcgaaagcggccttctatccccattttgatatcaaagcgttctggggctataacgccctgagcgtcggggatctgtttaagtcctctttccagcagatcaacctgctgcccgggctgtatctgccgatcttcgacggcggtcgtctgaacgctaatctgcagtcggtacgcaccgccagcaacatcctgatcaaacagtacaaccaggcggtgctggatgcggttcgcgatgtcgctatcagctccagccagcttaacgacctgaatcagcagcgcgcgctgcagcagctaaaagtcaccgcggcgcagaccaccaccgatagcgctcgcgctcattatcagcgcggcctcctcagccgctacgccgccgaagaagcccgccgggcggtcctcgcccagcagctgttgctgctggacattgagacccagcggctaagcaccgacattaccctgatcaaagccctgggcggcggctatcgagggcagtaacaagaatgccttcccaataggggaaggcattaagctgaaggggcggggtagatgcgcggcgattacaccagggcgcgcagctcttcccgcatataggtggaaaagaattccggatgcttaatcaccagccgttcgccggcggcgacccgttcagcccactccgccactttatcggtaaacccagcgctccagccctgctgttggccgcgcgcagcgacgtcggccggggtggcgggtacgcccagttcttttaaatatttgagaattcccttcgcggtactttcatccatagactgtggtactggctcagacgtattcataccaccgatgaaatccaatgctttatcaatgactgctggcataggtgtgtccttatattaaccacatagtaaacctgactacactatggaccggaaagcgacgtgatttcaaagaacacgctcacgttatgggacatcgcgcattgtgaaaaggggattttgttctgctggggcggggattggacaaaaaacaagccggcccgtagggccggcctgaggatcgcgtcaggcgttgctgagggatttttgcgcggcgctggaccgactgttctccagcatccggcggaccgggacaatcagcacggccagcacggcggcgcagatcagcaatgcgatggagcagcgggcgaagaggtccggcagcagcgacagctgatcggccttcacatgaccgccgatcaggcccgccgccaggttacccagcgcgctggcgcagaaccacagccccatcatctggccgcgcattctctccggcgccagcagagtcatggtcgccagcccaatcgggctgaggcacagttcaccgagcgtcagcatcaggatgctgcccaccagccacagcggcgacacaccggccccgccgttgctcagaacgttctgcgccgccagcatcatcaggccaaagcccgccgctgcgcacaggatgccaatcacgaatttggtcatactgcccggacgaacgtttttacgcgccagcgcaggccacgcccagctgaataccggcgcgaggagaatgataaacaaggcgttaatcgactggaaccagaccgcggggatctcaaaatcgccgatcatccggttggtatagtcgttagcaaacaggttgaaggaggtcggtttctgttcaaacgcggaccagaaaaaggccgccgagaccagcaaaataaagcacaccagcaggcgcgcccgctctttacggttgagtccggcgaagacgaacagccagatgaaatagagcgccacggaggcggcaattacatagaccagcacgctggccaccgccaccgggttaatcacgatcgtgcccaggctgataagcgtgaccagcaccgccactcccagagccagcgccagcagccacgctccaacgccattctttttcgccaccgggctgttccaggtggaatcgaggccaacctccgcgtcatagcgcttcatcgacggtacggcaaagacacggaaaatgatcagcgccaccagcatcccgatccccccgatgccgaagccccagtgccagccatgcgatttgataagccagccagagatcaatggcgcgataaacgagccgatgttgatccccatgtagaacagcgaaaaaccaccgtcgcggcgcgcgtcgccctttttatacagggtgccgaccatcaccgagatacaggttttaaacaacccggaacccaggacgataaacatcagaccgataaagaacagatcgttgcccagccatgctgacagagcgatcgacaggtgccccagggcgatcaggatagagccgtaccagacggcgcgttgttggccaagccagttatccgccagccagccgccaggcagcgcggccagatacatactgccggcaaaaatcccaacgatcgccgaggcgttctctcgcgccaggcccatgccgccgtcgtacactgtcgccgccataaacaggatcagtaaaggacggatgccgtaaaacgagaagcgctcccacatttcagtgaagaacagggagcccagcggataaggatggccgaaaaaggtacggctttcgtttttattaacagaggaatgcataaattctccaggtaaggtgcgccgcagcgcaagttaaccgtataaagcaggctgacgatttataatttgtttgtattaacatcaaacacgagcatttttaaccatttgataaccacgcaatggttttgtccagccccttaccttccctttttagatgaaaagtcgacaaacatctagttttacagatttaatgttcgcaataatgcaaacgacgttgactttatatcattacgcacaaaacgaaattttacccattaaaaacaaacagttaataatttatcgagagacataaaccaccggcgcagaggcggtgtataacggcaggaaaagtaagggaaacagactggatagtggagaaatagcgctaagcgagaatattgtcagcaatccaggcgctacatacctggagagcctaccatacagcaggattaacacggcatgccggctgctacagccggcgccattctgcgcgctatttcacacgctgccctgcggcatcaatgactggctcaccgtcctccttcacgaatgcgccttgttgcggcgccgtcaggatctccagcaccacctctgacgggcggcagagtcgggtgccctgcggcgtcgttacgatcggacggttaatcaggatcggatgctgaagcataaagtcgattatctggtcgtcagtaaaccggtcttccgccaggcccagcgcgtcgtagggttcgacgtttttccgcagcagcgcgcgcaccgggatcctcatcgcggcgagcagctggcgcagctcatcacccgacggcggcgtctccagataatagataatggtgggctcggcgccgctgttacggatcagcgccagcgtattacgcgaggtgccgcagtcagggttatggtaaatggtgatgctcatagtacgttctcatggctggttgaaggagagacgcagcgccagcgcggccagcgtcacaagcagcaccggcagggtcatggtgatgccgcagcggaaataatacccccaaccgatggtgatgtgcttctgcgccagcacatgcagccacagcagcgtggccaggctaccaattggcgtgatcttgggccccagatcgcagccgatgacgttggcataaatcatggcctctttgatcgtccctgttgccgcgctgccatcaatcgacagggcgccgaccagtacgctgggcatattattcataatcgaagagaggaaggccgacagaacaccagtgcccagcgtcgcggcccagaggccgcgctccgccagcatgttcagcaccgtggtcagatagtccgttaacccggcgtttcgcagaccatacaccaccagatacattcccagcgagaagatcactatctgccacggggcgccgcgcagcaccttgccggtgttaattacccgcccgtgcttcgcgacagcaaacaggatcccggcgccgagcgccgcgatggcgctgaccgggatccccagcggttcaaggatgaaaaagccagccagcaacagcagcagcacgccccagccggtgcggaacgtcgctggatcttttattgccgtggccggcgctttcagtaacgccatatcccaggccggcgggatatccttgcgaaagaacaggtgcagcatcgccagggtggtgaggatcgccgcgagatcgaccagcaccatcaccgaagcgtactccctgaagccgatggcaaagaaatctgccgaaacgatattcaccagattcgacaccaccagcggcaggctggcggtatcggcaataaatccggcggccatgacaaaggccagcatcgttcccttgctgaaccccagcgctcgcagcatggcaatcacgattggcgtgaggatcagcgccgccccatcgttggcaaacagcgccgccacagccgcgccgagcaggataatccaggtaaacagcagacgaccccggcctcttccccagcgggaaacatgcagcgcggcccattcgaaaaagccagactcatcaagcagcaggctgataatgataacggcgataaaggtggcggtcgcattccagacgatatgccataccaccgggatatcggctacctgtacgccaccggtggccagcgccagcgccgcgccaaatgtcgcgctccagccgatccctaacccccgcggctgccagatcaccagcaccagggtcaggataaaaatcgtacctgccagcaacatcgttcctccgccaatcacattcgaaaaatcatatatgttaagataaattttttaccggcaacccggcccgccagccagtctgctgatcatcagccgcacatcctcctgctgactgagccaggcctgctcaatcacctgcgccgcccaggccggcatctgcggagagaggcggtaatggacccacttaccctgtttacgatccagcagcaatccgctctcacggagcatcgccagatggcgggagatcttgggctgggactgggcgagcgccgtacagagatcgcacacgcacagctctccacgcgccttgagcagcaatacgatccccagccgagtttcatcggcgaggtttttgaacagttgcaggggcaataaagacatgatttctcctcaagcgtgacggacagcatacggggccacaaagaaagatcaatatacatgcgcaaaaacatatatattaattcacgtctgcgatgagcatccgggatgttgcgccccgccatccctgctaaatagcacggaaaaatgccgcgttttcttttatccatcatcgaaatatgtcaggctggagatcccattggattgccagggctttcaggatgagtacgatttatgtggttgttttaacgtatataaaaccgctcgaagaggttgaccgtgcgatccccgcccacatcgaatggctcaaaaaaggctatgccgacggcctctttctcgcctccggccgccgtattccccgcaccggcggcgtcattctggcaaaatgcgatagccgggaaactctgcaagcgcgtctgagccaggatcccttccagcagctgggtctcgcccgtacagagattattccctttgaggccagcatggcgtcacccgcgctgcagtcgctgttataaccctgtctgaaagcatatcccggaggaaaaatgcagccgtactttcactggatcaatgaacctgccgagtggcgccgcgattccgacggcctgacggtggtcactaataagcataccgacttctggcgccatacctggtatggcttcgagcgcttctctggccatctctatgccgcagaagtggcgggcgattttaccctgcaggcaaaaatctgtgcggatttcaccacgctttacgaccaggctgggctgatgatgatggccgacgagcagacctggctgaaggcgggaattgagtttaatgacgatgccccggccatcggcagcgtactgacgctaacccactccgactgggccaccgggcttttccccggcgacccgcgcaccttctggctgcggctgacccgcaagggcgacgcgttaaggctgcagtattcaaccgacggcgagcgctggccgctgctgcggctcggctactttccgccaggcccggtgaaagcgggcgtcatgtgctgctcaccggagcgtggcggactggcggttgcgtttcaggatattcagctttccccaccgctggacaaagcgctgcacgatctgagctgaacgctagcgggaagacccgactttctctgcatcatccgcggcatgcattatcaggaaatcaatcagggctttcacccttttcgttctgcccgcgttttttgggtaatagagataaaccggcggataggttttccagtagtcctccatcacgggaataaactgctcacgatcgggctgtaattgcaggattggttcaaataaacggccaatccccagtccgtggcgaataccgtcggccatgacgtcaatatcattgctgattaactgtccgggcatctcgacggtgagctgctcgccgtggtcattgaggctcagcggcaggatgcggttgttggtaataaagcgatagccaatcagccggtgatgatggagatcggcaggcatcgcgggcacgccatattcggcaagataggcagaggaggcgtatagcccttcacgaaacggcttcattaacgggcgggcgaccacgccgccttcgagaatatcgccaaagcggatcccaaggtcgaaacgttcttcaataatattgacggtaccgtcatagaccgatatttccagctggatccccggatattgctgacaaaatgccgccatcgccggtttgagaataagcaggtaggcaaagcgcgagagggttattctcactgccccggagggctcctgattctggtcgcggatgatttccagcgacttttccagtgtctccaccgccgcggcggtctgctccagcagctgttgcccggtttccgtcagctcgatacgccgggtagtgcgcacaaaaagggggtggccaatatgctcctccagcagcctgagcgcattgctgaccgacggcggcgtgatttcgagcttgcgcgcggcggccgagatattgccctcgcgcgcaatgctctgaaagatgcgtatctgattataaagcgcgttattcatagcatctccttacgacaccctcgcctgattattaagtacaggctaaatattcttaagtcaatgaccgcctaatcttccccccctgcggctcgtatacttttgtctcttcccgctgacaacgactttccggagacaactatgcgaattttatgtctggatatccctgcccccggcgcgacgctggaacactatgcgccgcaccttaccgcagaagccctgcatgcctggggactgtacaagtcaggctttattcgcgacatctatttccgtcaggatcgacccggcgtcgctattttcctcgagtgcgacaccgtggaagaggcgaataatgtcatggccgaatttccgctggcaaaagcgggtctattaaccttcgagtgtattccactcggctcgtttattagctgggaaaatctcttctccgctgaatttaaacatcaggagtaacgttgggaatggctcatattcttgtcgtttccgggcatccggatcttaaccattccatcgccaacgccaccatcctcgatgagctggcgaccgccctgcctgatgcggaaatccgtcgtctggactggctctatccggacggcaaattcaacatcgccgctgagcaggaaagcctgctgcaggcggatgtgattgtctggcagtttccctttagctggtatgggctgcccgggttaatgaaacagtggctggacgaggtatttgtccacggcttcgcccatggctcaacggcgaaactgggtggtaaaaagctgatcctctccttcaccacgggagcgccacaggcgctctataccgctgacggtttctttggccatgccgttgaggagtatctccttcccttcgagaccacggccaggctgtgcaatcttgcgctgctggcgccggtttatacctgcggtattagctacgccgaccgggatgccgacaaaatcgctcagcaaaaaacgcttgcccgggaacacgcggccagactgatcgcgcggcttaatactctggtggaataacccaaagggagaaaataacgatgcagtatacccggctcgggaagagtgacttactggtctcccgtatctgcatgggatgtatggggtttggcaatccgtcaacgggtcagcatcgctggacgctggacgaaacagccagccgggacatcatccgccacgctctggaacagggcatcaatttttacgataccgccatcgcctatcagaacggctccagcgaacggtacgttggccgggcgctgcgggagatggcaaaacgcgaggaggtggtgctggccaccaagtttctgccacgaaccgccgcgcagattgccgaggggatcagcggaaaacaggctataacccgctcgcttgaccagagtctgcgaaacctcgggatggactacatcgacctctacatctaccacatctgggattacaacaccccggttatcgacgtgctggaggcgctgcacaccgcagtgaccgccggcaaggtgcgcgcgattggcatttccaattgctatgcctggcagctggcgaaggcgaacgcccttgccgaacgcgaagggctgacatcctttgtttctgtgcagagccactacaacctgattatgcgtgaagatgaacgagagctgttcgggctgtgcgcggaagagggtatcgccatgactccctatagcgcgctggccagcggccgtctctcccgcttagaaggccacacgcggcgagcggtggaagatgattatgcccggggcaaatacgacggcacggcagagcaggaccggatcattattgcccgcgtcgccgaacttgccgaacggcatcaggtctcgatgaccgaaatttcgctggcctggctgctgactaaagtcaccgccccggtgatcggcgccacgcaaaagcatcatgttgacggcgcggtcaacgctgtagcccttcaactgagcccggaagacatccgttatctggaagaagcctaccagccgcacgttctcacaggcgtgatggcgcaaaacacgccgcaagccaaagaccatcctcaggtgtggacgcggtaaccctctgtcctgttcagcagggagaataaaacatgaaaaacgtgattgccgcggcagccttgtcgcttgtgctgtctgattttgcttatgcccacgaacaaagagatgaagctatgatgaaaattaccccttccacccttgcggacgctgatattcaagcggtctccccggcgctggcgcgcttcggccgcgaggccatcagcaacgacctctggcaacgtgacgccctgtccgcccgcgaccgtagcatcgtgaccgtagcgatgctgattgcccgcaaccagccaggcgagctgaagcactatattgccgttgcgctcgatagcggcgtgacgccagcggaagtgtcagagatcattactcacctcgccttctacgctggctggcccaatgcgatgtcagccgtcagcgtcgctaaaaccatctttgaagccaggggcgtgacggcagaggccctgcccgccgcctcgccaacgctgctgccactcaatgaacaggtagagaaacagcgtgcagacaccgtggaaaaaaatgtcggccccatttcgcctggcctggttaaatttaccgccgacccgctgtttctcgacctctggcaacggcccgcgcttacgccccgcgacagaagtctggtgacggtcagcgcgttaatcgccgccggacagagcgcgcagattggctaccacctaaacagagctatggataatgggctttcggctgaagaggccggagaagtggtcgcccaggcggcgttctacgcgggatggccaaatgcgtttaccgccgccccggtggtcggtgaggtattacgatcgcgcgagagcaaaactgaataaaaaagaataaaggacagggaagctgtcctttatttatttgcttcatttaccttcatcgctgaaatatttcagaaataacaactccgcgtccgaaaattcctaaatactcctgcctgttgttgtaaacgcaactccaccaaaaaacggtaacactaaatacttcaccccagaccacaagaattactgctatattgaagaagcattgagagtcatccgtttagtctggccaataaccctgaaaatgatagtgaaaaaatgcggaacgtacttattacaggcgcaaccggttttttaggtggtgccgcattgagttatatcttgaaagaaaaatccgaatgccaactgctattactgacaagaggtgaatcgacaaaacatgctgtgatgcgtgtcaatgagaacctcagaaaatttcaactcgctgaaacgttaattaacagaatatccagtggcaatatcctgctaggagacctgacggcaccggatttttttcttgaagattgtcgtctcaatgccattactgacgtcatcaattgtgcgcatatcacctcatccggtaataatccgtttatttggacagggtatgtggaggggatgctcaggtttgtcgatcgtatgagccaggccccctcattgagacatttcctgcatattgaatctgcagggctaggtgtatccgcatccgaatgtgggctagacaacaaaccagggttttcaaactatgagaatgcgattgcccagtgcagttgggcaaacagcctcatcgagcaacggataatagaatgttatcccgagcttcctctgatgagaatcgtgccttccaccgggatcgagcagactgagttaggtaacagcatctgtcggcatttaaatctgccttagcgctgaggaaattcacgctctcactgcggcataaccggcggataaattcgggaataaaaacaacacggacctttttgccagtgcaccaactgaagtgcgtctggctaattattaacagagatgatcaccatgatgcagctgagtaaaaggatgattgttgtcagccttctcgttccggcgattctggttggcctgctatcgttggggatggccgttcgtcagttgcaaagggataccgccataacggcggagattctgttaggccaggttgaccacgtgacgtcgattgctcgccataccctccacacgacagcgcaaatggcgaatcagccctgcgaaaacgttgttgaaaagatgaccgaaaccggtgcgctcaccccttacatccgtagtaccggtctggtgcgtggggacacgcttgtttgttcctccatcaccggctccagacagcaaagtattcggtcagtttatggactccccctctcagcagagatgggcagtctcgaaataacggcgattaacggtacccgcagcgttccgcatcagacggctatcatctacgcctctggtgccggtaatggcatcacggttttcagcgtagtagatggacgatattttaccgatctgatggaaaccctggatgatgaaaatcatgccatcctgcggttgcggtttagtgacggtcccgttatctccagtcaggataaaggcactgaagacctcgcgggcttcagtgcggtattcaattctgactttagtcaggcgcgtatacagatcatcaccccctggcaatcgcttgctcgctacctggtgcgcaatatgatttttctcggcccggcctctctactcctgacgctggctacgctgtatttatggcgacgctggctgacaggaaaattgtctctggctgatgaaatagcgaagggaatggcgcgaggagagtttgttgttcattaccaaccggtatgtgaggcggcgtccggtatgtgcaccggtgcggaggccctgatgcgctggcagcgggctgacggcagctcaatatcgccagcgctgtttatccaggcagcggaagaagaggagatgattatcagcctgacgcgacatctttttggcctgatcgctgccgatgtcaaagcctggcaggtgaccgcccctttccatctgggggtcaatatcgctgcggcccatctgacggatgacgcctttaccacggacgtgctgcagtttcgtcaatccctcgctgcctcatttcgcctggtactggaagtcaccgaacgcagcctggtcgatgacaccgcattggcctcagagaatctgaacgcacttcgtcagcatggctgtcaggtagccgtggatgatttcgggacaggatactgctcattgagtctgcttcacaacctgcccgtggactacctgaaaatcgataaaatttttattgatacgctgacctccgccgggacggatacgccagtattggataccatcattggccttagcaagcgtctgggcctcgccacgattgcggaaggcgtcagtacgcaacagcaggcagagtggctcaaagataaccgggtgtcttacgtccaggggtatctttatgccagaccgatgccggcagctgatttcatttcctggtacgaagaaaataacagaaagcgtgagactggccgtacataacaccgactgcgataccccgccgctgatggttgatgtgtatcagcgatataccgcatagtggataaagagagagcatagtttcggccaacaaactgcgctctgcgtttgaaccacaccgggcggctccccatctggccagtaccgccatgatgactgaagatactgcctttgagacttaccgtcatggtgtgggcaccattaccgccgctaatgaagcggcaaacggtctgctgagcgcagagcaaaggaatgtcgacgcctacacctccgcgctgatcgccgcagcgaatctcgcttttgtcatgggggaaatgacgcaggcctctggcaatataccaaacacgatggagccgcctttgtccgacgagacacaggaaaccactttcggctaaaccataattaaccaacgcgaagacgccctggcaatgggaaatttgatttcgcccatatctgttcagcaaagctgagaaaattatccgagagcatgaagcttgacgcccctcactgcttcctttttatggtattggatgcaattcatcacgtaatctctctaacttgatccagacctcgcacggcctatttcccattgaatgacaggcagtgaaatcttactcgaggtgatatcaaccgcagatattgtcgcatcatttaatttgatcggtatttatttacatccgggaaaatcctacatccgtcatcccccaccttcaccaggcccactataatcctacatatatctggcaagtccaaagcaaaataatttttttgatgaaattaggggggtgtagtatttcaggagacttttcatagcattttcttgaactaaaaaaatcacccaagcctataaacaaacaaaaaaaacaaccattattatcaaagtgttacggaaggcgcctttagagtatagactaccacagttcctttaagcgattgataacgatgacaagatagctttcacctattcaaggatggtttttataacggcaagaacgatttctcatctatttccctctctgctagtcttcagcttacawtaatactggtagaaaaatacttattatcaaaagcgaatcattgcttatcatacctgattattatcagcagaaatttactgatacatgtgtttcctgttcttttaccaaaaggtgtttttatgccagacttaatcttcaaacattgctctctcagcgcctatgaaaaaagcgaatccgccgcgctctcgtggtcaaaaaatgcagcatgtcatgcctcctgtccacggtttatccctaagcaaaaaaacaggtcaggagcgcgttttgcaacatggcttaacggggcagtgtttctggcaatgatacctcaatcggtatcggtatttgttctcgagccgggttatacaaaacctggtaactgggatccctcgtgactaaaacgcaggatagccgtgaatgtcggggccaggcagcagcaactttgatgggatcaacgtagggaaagatccaaattttatctcaatacaggcttacgccaatacgacagggttactcccgggcaaacgttaagagatacccaccgatgattctcgggatgatgccattttaaaaggtataaatatggtcgctactgacattttttgggtgggcctgggcggcggcaccggctctttactacgctggtgggttggtcttgccgtcagcaaactttaccgcggacattttcctctcggcacgtttttaatcaatgtgagcggcgcattaatcatcggatatctcagcgcgctgttcggtatcgactggcgcgagcgctatggtgaatggttaaatgcaggcctgctgaccggtatccttggcggttataccaccttcagcagcatgcagttagatgccgccaacctggctcatgcgcaccagaggttactcgctgcaggatatttaatcgtctctgtggttaccggcgtggcggcggctgcctgcggtgcatggttagcctgtccataaggagcgcatcaggtgcttaattttactattctgatctttgttggcggggcgtttggcgcaatatgccgcgaattattgatgttggtagtgcctcgcctgagcgatggctttcccctggatatcttcatcgccaatattattgccgcttttttgcttggtttatgcacatcactgtataaaaggaaccgggttaatcagtacatccatatgatggtggctacgggtatcatgggagggctatcaaccttctccagctttgtatctggcgcggtggaaatgatgaatgagccactcagcgcgctgatcgccatctgttatctggttatcagcctgatagtcggttttatggctgtggagctggggttaagactgggctcccgagtaaagcctgcgccgcccatgactcataacagatcgactggttaagtcgaactgactttttctcctgttgcgccgcgcagcagagcaatcaggagcgatccggtgaaagcggcactatcaatggtagtccgcctgactggaaaaaaagattatcgccgcgcttaatgcctgcaactgctgcgtaagttcatctattccctgcggcaaaacggcttcaggttcccccgccgccagcgcattctctaactgttcagctgtcgcatggatagcggttgcgccaagaatctgtgcagtaccattaattcggtgtaaatggtattgcgccagtcgccagtcttgtccactgatggccgcgcgcgctgcggcgatatccttttcgttttccacccgcgattgctcgagcatctgccgcattaattttttatcacccagcgtcagcgcggtgaatatcttcatatcgaggaattcatcaagcgagctgccgggctggggtatatttatttcacacagcgcggtggccagctgagaaagatccaggggcttaaacaggcacaagttcatgccactggccaggcaacgctctttttctccggccacgaggttagcggtaagcccccagatgaccattctggtatcgtactcgcgcacgcgacaggttaacgtaataccgtccatcacaggcatattcagatcggtaattaacaggtcatagcgctgttgctggatgagtttaagcgcctcggcgccatccttcgcttcatcagcagcgtagcccaaggtatcgagctggcggcgaagcagctggcggttggcggggagatcctcggcaatgagaatacgaattgcctgcggaactgccttaacgttcccaggcagggtatcaacgttcaaaccaagcaaagactgagcggtggcatacgccagtttaaggcactgctgatcttcttctgctgtttgttggcgggtgaagataagttcaagaaaccccaggatagcacttactgacgtacgaacatcatgactcgagcagggcaaagaggcactgctctcctgactggcgtctttgacctgttctttttcattctgaagcttctccactaactgtcgggactcagtgatatcctgccagccacacattaagaccggtgtcagggttgtgggtaagcggcataacaccatccagtgcaaaatcgttcgttcctctataccattatgtaatgccagtggatgcgtgataatgatatcgggggtcaggcccagctgaacctcatgctggatcgcagggaagatatgcgcgagaggatgacgccggtcgaacagtgaaaaatgcatcgcttcacgcagatgctcggggaaaaaagcgctgaaggcgttgttataactgtcaagctcgcccttaagggtaatcacatacaccggtatcggcatcgcgttgaacaacgtctggtgaaaactgagctgatgctccagcgccgcctgaaccgcttttcgtttgcgctcagatcgcagccaatgcacgccccagagcaaaccactcaggatcaatagcgtcgccagccctgcaaaccagtaaaagggtcggctatagaagctccaggtatcgatagtcacttcaggcatgttggtccactttcccgtagggttcagtctctctgttagcggggatatcatccgatgccttattgagaatgcattgccattttattgccctacacgggaacatgaaggcatcgttcgcaggcggctctgcccgcgacatttatcagtataacaggcaggcacaatactctttccatcaataataaataatcgatttagaatccgcgatcgcgttcagaggactcatgtatgcttaactgtgaaaactttgcacctacaatgacgatacctgacattcgtttttgcgccagccgttgctgacggctttgatttataaagacgggggacacgctaacatcccccacagtaacgctggatatgcccttcaccggtatatcgcattatccgattttattacggtttgcaaatgagaagagatccaccagcgatttacaacccagcttctccatcaatcgacctttataggtactgaccgttttattgctgatatgcatctctgaagcgattttcatattgtctgccccattcaggatggcgcgcatcaccttgacttcctggctggagagcgactgcagcatcgcctgctcattagataagctgccgacaaagccactcagcgaaaatggaaaatagctgtatccattttgcgcagcatggacggcagagatgatattgtttatcccctcttttttactgatgaaggcattagcgccggcatctgcactacgcttgccataaaagagatcgtttttcgccgaaaccacaatgataatctggctaaattgcttcttacgcagtttttcaacgacttctataccgcttatgacaggtatatccacatccacgatcaccacatccggctgatgttcggctacagccgttaacgcttcgcccccatctcccgcttcggcaacaatgttaaaaccctcactttccagcaggttacggatcgccattcgcgcaagaggatgatcatcaataataatcgcgcttaaatttgccgttttactcatcattattccttgttatgttgaacgtaatgacatgctgtgctctccttctatccaaccagacatgcctgatcgacgatatgcaaacgtagccggaagaccgggaatcgtattattcatccattatctacaatagcatccttcatcgtcctcatcctagataggcattgaaagttttgtcgttgcaacctgataatgccgttttctttcacttaccttctgcagggattacatctgtaagaattaacctgcaaatatttccgatacatccaatgtgactgttccaggcataattttacacttgtttaaccgggactacatttaccaccgctatgcatagtgatgctatgtcattcccgctgggctaaaaatcattaaccaagtggttatatgcataaggaaataacatttcaatacgcccattttcctcatagcatctatcaaacgcagcgcttcctgcacataaatttctcttgcatacagacatatggaataagtttcatcatgaacaacttacatactgacgaaaacattaccggcaagcaaattcaaaaaagaaaaaaaatgttgcttattttcgcggctatcatggttattgctgctggttccagcacagcctggtggtattttgatttacgaaatgtgcagagcactgatgacgcctatgtgaaagggaatcaaattgccgtctcttcgctggttgcgggaagcgtaattagtattaattacaccgacacggatttagtgcgtcagggtgatattctcgtcacattagatgataccgacgccagaattaattttaacaaagccgccaataatctggccaatacggtccgcaagatcaaacagatgtatattgctgacgatcaatataacgctaacgttcaggaagccaaaatcgcatatcagcaggcactggcagactaccaacgccgtagcaggctgcagggcgcagcggcgatatcaagggagaatatgcaacatgcaaaggatgccgtggacagcagcaaagcagcgctggatgttgctgttcaggcttatcgcggaaaccgtgtactgattcagaatacggcgttagaaaaacagccggaagtgttaatggcagcggaatccatgcgggaagcctgggttgcgcttcagcgaaccaaagtgcgcagcccggtcacgggttacctcgcccaacgcaatgtacaagtcggggaaactatcggctcaggccaggcgctgatgtcaatcgtaccagccgagcaggtctggattaacgctaacttcaaagaaacacagctcaaaggggtaaagatcggtcagaaagtctcgatcgtcaccgatttttacggcagcgatgtggtgtttaacggccaggttgatggtatcaacatgggcaccggtagcgcattttcggtattacccgcgcagaatgcaaccggtaactggatcaaagtggttcaacgcctgccagtacgcattacgctggatgccgagcagataaaggcctacccgttgcgcatcggtttatccaccaccgtgcggctgcatgaaacccgttcgcagggcgaagcactggcaacaacgcagcgaaaaaccccggcttacgcaagcaacgcactggttatcgataccacccctgttgataacgaaatcctcaatatcatcaaagccaacgcgatgtgatttatgagtaataatactgcacttccgccgctgaagggtgctgccttagtactggtgacattagcgctgtcgatggccacctttatgcaaatgctggactccaccatttccaacgtggcaattccgacaatctcaggatttttaggcgcctcaaccgatgaaggtacctgggttataacttcgttcggtgtggcgaatgctatttctatccctgttaccggtcgtctggcgcaacgttttggcgaacgcaaactatttttaacctcggtaaccctctttgcactggcatcattatgctgtggactttcgacaaatctggacactctgataggattccgtgttgttcagggtctggtggctggtccgctcattccactctcacaaagtctgctgctacgcaattatccaccggaaaaacgcaatattgcactggcgctttggtcaatgacagttattatcgctcccatttttgggcccattattggtggctacatttgcgataattacgactggggctggatatttttaatcaacgtcccactgggtgtcattgtggttgcgctgacctcctggttactcaaagggcgcgagacgccaactgaaccggttaaaattaatctcatcgcgctgagcctcctggtgctgggcgtcggcagcctgcaaattatgctggataaaggaaaagatctcgactggtttaactcaaccactgtcattgttctggcgattattgccgttgttgctattattttactggtcatctgggaagcaacggataataacccgattattgatcttagcctgttccgttcgcgaaattttactattggtattttatgtatcgcctgtgcctatttaatttatgccggggcgatcgtgttaatgccgcagttactgcagaccgtttttgagtacacttcggtatcggccggactggcttacgcaccgatcggtatcatgccgctactgcttgcgccgcttattggtcgctatggcaataaaatcgatatgcggatgttggtaacgtttagttttatcatgtacgccctgtgttattactggcgttccgtcacctttagctcggccattgattttacgtgggttattatcccacaatttatgcagggttttgcggtcgcctgtttctttttaccgctgaccaccatttcactttcagggttaccgccggagaaattcgctgccgccaccagtctgagtaattttttccgaagtttgtccggctctattggcaccacgatcaccatgacgctatggagtcgtcgcgactccttccaccacgcgcagttaacagaatcagtgacagagtataatcctccgtctgtcgatatgttccataaactgcaacatatgggttttgataagcagcaaatagccacctatcttgatgaccaaattactcagcaaagcctgctaatggcggccaacgatgttttttacctgtcggctggcgtattcctgatgctcactctgctggtatggttcgcaaaaccaccgtttaactccagcaaagctggataatgcttgttatctatcaggcccggcaacgggcctgataatccccctcctgtttcccactcgctacaagcctgttaatttcacatcatgtccagccagtttatacaaattacatactataaccgttgccgtcccgccttcccatccataaaagaaaaagcggcgccaacgactccgttgagaaaaattaaagctcccccaccattgcatcctacacctgtaagatattgatgatatcgatcgactcgcactccgatatccacgaaaataaccgccacttataataactgaaatactattaaatgccgtcgcctactatctgctgcggttcattttgctaccgtaatgactaacggagaaatcatgttatttattgacagcagtaaaataaatactctcggcagtacgctggtaaaaagataccgcagagctactgccgttatggccgttatactgctgttgtgcgcgctggcctgtatgctcttcccaatatatagcggtgtggtcattagcaccctgactggtgctttaatgttcatctgtggcatgtactctgtggcgatggcattgatattcattaaatataatactcgttcttacatctcatcgttattatttggaattatttattttggcatcggctgtggttttatctttagcacgtcattcggcattaatactttgtcattgctgttttgtgttttatttatccttgccgggtatagtcgcatcgccatgggatttaaagatcgggctatgaagggtcgttattggtgtattttcattggcataatagacctcatcatcgccctggcctggctccgcgctagcgaagacgccagctatatcatcactgtcacctttattgggctggaaatgctgttctgtgccggattcttcttagtgctcagctatgcactgaataaagcacaaaaaaaattaattaccacataaatcgctattttatatatggtttataggctttttaaacaggaaaacatcatgaaaaaattatccactctgtttctcacacccgttgtgactcttgttttactgaacgccaacgccgccgtggcggcggagaaagcgtcggaaaccacaccgcaaaacatgacttgccgggaataccttgatatgaaccctaaggcaatgaccccggtagcttactgggcaatcaataatgaaaccgtctataaaggtggagacaccgttgactggaatgaaacggataccgtctcggtaccaaagttaatcaaaatctgtcatgaaaaaccagaaagtaaaattatgcaatgggtgaatgatattcgataatcctgcgcagtttattcttttctgccatagctgataaaccaccagcggaaaacagcctatcttacagattgctgtttttcgcttttttacgtgcctgccttcttattccgtcctgagatataatttctccggcagctaccctgacagaaataagccaatattttattccgtcaggcaacaacttacaccagtaggatgggtatgactcatgcgggtatccactctgatatacagattataaaacaagctatacactcttgaagtatataactttacaaaagtcaggagacctattttatcgaatgcaaggcatgcatttataagaggttgttagcatgtctggcctcctttaggaaaatcagcacacagcctgccatggagaaaagcgtgaacgattaaaagcatattaacaggttaataaaaccactccctcgatgcgtggaggatttattttacgaatataaacaatgtcctgcatatatattttacatatcgcactgtcatatcgtgcaatctgcgttcgccagcttaaaaaatcaacgcttacaggcgctgtataagatcacagggataattttatggaacatgcacttgtaaattatttatcattagatgtacctaacactgcttttatgttgctctgcgccagcctcgtgatgttgatgacgcccgggctggcatttttttatggcggactggtacccagaaaaagtattgtgacgataatggcgcaaagctttttctcgatggggtgggtcgccgccctttggtttattgtcggttattcactgagctttggtccgacgctcaacgggatcatcggcgatcccctctattattctttcatgaataatattgatccagggacgatgtacaccggtaacaaaggtggcatccccttattagtacattttgtctatcaaatgatgtttgccatcattacccccgcattaataacgggtgcgtttgcgaatcgcgtcaattttccggcgtatctggtcttccttaccttctggacacttctggtttactgcccgtttgttcatatgatctggagtccggagggaatgctggcgaaatggggagtcgtagattttgctggcgggatcgtggtccatgccacagcgggttttgccgcactggcttcagcactgtatgttggcaaacgtacggtggcctcagacggtacgcataatattccttatattgccctgggagccggtttattgtggtttggctggtatggttttaacgcaggttcagaactgcaggtcaatactgttacggtctccgcgtttgtgaccacggatatcgccgccgcttttgctgccgtcacctggtttgtcattgagaaaatccgtacaggcaaacccaaactggtcggttttttaaccggcgcagtagccgggcttgccactatcaccccagctgctggctatgtctcgattcagtctgccgcgctaattggcattattgccagcttcgtctgttatttcgtggtgctgttggtacgccgctaccttgatgatgcgctggacgtgtttggcgttcacggcgttggcgggataacaggttcgattctggtgggtgtctttgcctcagccacatggaacgcgaatgggcctgacggtctgctggaaggcaatgggatgcaaatcattaaacagattaccgccgtggtatttaccagcgtctggtcgtttattttcacactggctattctgtggctcattaataaattcaccgtagttaaagtcgaccagaataaagttggcggcgaactcgataacactttattcggcgaagatgcctatagcgagaaaaattaatatctctctgccccatccctgtggctggggcagcatcaccgatattaaacaatgtgtgtaatcaggaatggaggaaatatgcaactcacgcccagagaaattgaaaagctgatggtttataccctggctgacgtcgcgttgaagcgcaaaaacaagggtctaaaactgaaccacccggaagcggttgccattattacgaccacggcgatggagggtgcccgggaaggaaaaaccctggaagtggtgatgaatgaagcacgtaccgtattaaccaaagaggacgtcatggacggtgtggctgatttaattcctcacgtccaggtcgaagccattttcaccgatggcagtcgtctggtcacggttcatgacccgattcagtgaataagcctgaaatgactctgcaaaggagctctaatgaaaaagcaatccaacacttcggaaaccatggttaaaaaggtggagacaggggtccccatcggcggctatgtattagcggactcgccaattacttttaatgaaggccgctccattactaccgttcatgtcaaaaacacgggcgatcgtccaatccaggtaggctcgcactttcatttctttgaagccaataaagcactggagtttgagcgcagtaaagcgtttggtaaacgactcaacattaccgctacgacagcgatacgatttgaaccgggtgatgctattaccgttgaattaattcctttcagcggtcagcaggtggtatacggctttaataatctggtcgacggctgggtcggcaacgcctctggcattcagggcgatgcacctgaagatattcttaacaatgccatcaaacatggttttaaatcagtaagttaaatttcagaattaactgtctagtgaggattttatgccaactatttcaagaaaagaatatgccagcctgtttggcccgacggtcggagataaaatccgcctgggtgagaccgacctttatatcgaaattgagaaagacctccgcggctatggtgacgaatcggtctatggtggcggtaaatcactgcgtgatggaatgggatcgaataataccttaacgcgcgataacggcgttctggacctggtgattaccaacgtcacgattctcgatgccaaactgggcgtcattaaggccgacgtcggtattaaagatggcctgattgttggcattggtaaaagcggtaacccggccattatggatggcgtgacgcagaatatgattgtcgggctcagcactgacgccatttccggggaacacttgatcctgaccgcggccggcatcgacagccatatccatcttatttcaccgcagcaggcgtacagcgccctatcgaatggcgtggctactttctttggcggtgggatcggcccgacggacggaaccaacggaacaaccgtcaccccaggcccctggaatattcgcaagatgctgcgcgcagtggaggggctaccggtcaacgtcggactgttgggtaagggtaacgcgtttgggcgtgctccgctggttgaacagattattgccggggtggcgggcctgaaagtgcatgaagactggggagccacgccaaacgcgttacgtcattccctgcgtattgctgacgaaatggatattcaggtatcggtgcataccgatagccttaacgaagcgggttacgtcgaaaacactatcgaggcgtttgaaggccgtactattcataccttccataccgagggggccggcggtgggcacgcaccggatatcatcaaggtggccagccagttaaacgtgctgcccagctccactaaccctacccttccattcggcatcaacacccaggctgaactgttcgacatgatcatggtgtgtcacaacctgaacccaaacgtggctgcggacgtttccttcgctgaaagccgcgtccgtccggaaactatcgcggcggaaaacgtgctgcatgacatgggcgtaatctcgatgttttcgagcgactctcaggcgatgggacgcgtcggagaaaactggctgcgcgttgtgcagacagcccatgccatgaaagtctcccgcgggaaactgccagaagacagcgacggcaacgataacttccgggtattgcgctacgttgccaagctgaccatcaatccggctattgcgcatggcgtaagccatatcatcggctcagttgaagtgggcaagatggccgatctggttttatgggacccgcgctctttcggtgcgaagccgaagatggtgatcaagggcggcatgatcaactgggccttgatgggcgatccaaacgcatcgctgccgaccccgcagccggtattctatcgcccgatgtttggtgccatggggaaaaccctgcaagacacctgcgcgactttcgtgtctcaagccgcgctggatgatggtgtcaaagagaaagccggccttgagcgtcaggttatcgctatcaacaattgccgctcagtaaccaagcgtgatttggtacgtaactccgccacgccgcatatcgaagttgatccggaaactttcgccgtgaaagtggatggtgaacatgccacctgcaaccccgtcacaacagcggtaatgaaccaaaaatatttctttggctaagcgccatatccgtgcgttctgatgtgaggcaaataaacatgatactgattgagacgattatcggaaatgtaaaaaacgacccgtcgtggcaggaaaagacccgcggatatcaacacgatgtgctgtccctggaacaatgggaagctcaaaaaagccgttgccgtaagcaaagcgagcagggttttgatatcggtatcgctctggatcgtcgcatgcggttaaccgacggggatattttgttatgtgatgacgacaaaaaatacctgttaaccgtacatatcactctgcgggaagtgctggttatccagctcgcctccctggccacggcagagttcgaaggcgcaattaaacgcgtgtttgaactcggacacgccctgggaaatcaacactggaagtcggtgatcaaaggcactcaggtatatgtccctttatcagtcgaaaagaaaatgatgaattccgtgttgaaaactcatggttacgcgcaatctgaatatcactttgtcgcgggtgaaacggtattaccacacctgacaccgtccgagtcccgcctgctgtttggcggtgcggaagacccgcatgtccatgtcagcgtactcagcggcgatccacagcacggccacgcccacgatcgatctcaccacgcacatcatgggaatgcgcatgagcataaacattgatgaatcacatcagctcctgcgtctgatcagagtattgcagttcggcgactcggttctgccagtgggagcatttactttttcatgtggtgtggaatccgctattcaggtgggattggtccacgatgtcgtgagcttaaaagcgtttgttgaaacctcgctggtccaggcagcgcaatgcgatgcgattggcctggcccatgctcaccgggcattacttgatggcaacttagatcagcttctggccgttgatcgcgaaattatgaatcgcaaactcaatgaagagtcgcggttaatgacgcagcggatgggtaagaaactggttgagatgacccgtcaggtgttcgaagccgacctgctgacgtggtggctggataacattaaaaccggacagacagcaggcacatttccggtaagccaggcgctggtcatggggttacaagggatcagcgctcaggaaaccatcgctatgcatcagtatggcgttgccatgactatcctgagcgccgcccagcgactgatgaggataacgcactttgacagccagcagattctgtatgccgtaaataaaaacatacctgaattttgccggcaggccgtgaatgccgatatcagcgaaatggcgtcgtacacgccgcttatcgatattctggccgccgtacacgttgatgcgcatgtgcgtttatttatgaattaaaaataaggactggagaatgaaaaaaattactcgcctgggtatcggcggcccggttggttcaggtaaaacagccatcattgaagtcatcacccctaaattaatcgagcgtggttataagccgttaatcattaccaatgatgtggtcacaaccgaagatgccaaacaggtaaaacgcaccctgaaaggcattcttgatgaagagcggattatgggcgttgaaaccggagcctgtccccataccgcagtacgcgaagatccaagtatgaatatcgctgcggttgaggaaatggaagataagtacccggacagcgacctcattatgattgagagcggtggcgataatttaacgctgacctttagtccggcgctggctgatttttatatttacgttatcgatgtggccgaaggggaaaaaatcccccgtaaaaatgggcccggcctggtgcaggcggatattttgattattaataaaatcgacctcgccccttacgttggagcgagccttgcagtcatggaggatgataccaaaattgtgcgcggcaaccgtccttatatattaacgaactgtaaaactggcgaaggcatcgatgccctggtggacatgatcgaaaaagatttcctgtttacgcacgcaaaataggagccatcatgcagaccaaacacaaggcgtcgccggcgttcgatactctttctctgggcgcgttggcgcccgaactggcaaagtatcaacaagagccaccgcaaatggccagcggcgccgtcggcaaacatggctatttgcggctacgttttgccgatcgtggcgccaaaagcaccctccatgaaatggaaagaaaggtgccattgctggttcaaaaagccctctactgggatgaggaaatgccattcctgccctgcgtacccatgatctccacctcaggatgcgttttgcagggggatcgcttaacggtggagattgaggttgatgcgggcgcctgcgcccatatcaccacgcagtcagcgactaaaatccattcgatggataataattttgccgcgcaaacgcaacatatacgcgtcggtaagcaggcttatcttgaatttatgccggatcaggtcattccgcatcgtcattcgcgatttatcagcgatacccttattgaatgcgacagcaccgccaccgtgctttattcggaaatcctgatgccagggcgtaagcatcatcaccaggatgagcgttttggttttgatgtttattcctcgcggatcagtgccaaaaatgaagccggtgacgttttgttcactgaaaaactggtacttacccctaaagaaaagccgctggatgtcgtcggcgtaatgggaacattcgatatttacggcaacgtaattgtgttgaccccttcaacctgccaggacgaaattttgtcccgttcacgctctttttatagcgaggagctgtgtcatggcgtaagccgtttacccaatggggctgggcttatttataaggtactggcaaacgacagcacccgtataaaaaaagccatccgggatttctggcaaaccgtgcggcaagttgccaccggttattcattgccggcgccctttctctggaaagtctgacctttacatcagcgtgttgccttcaggaaaagggccttaacggccctcttccgtcagacaagctcagaatgaaaaataattagcaggagacgccacatcatgaatacctcatcagctatagcgagtaaatggactcattacactgaaataaaccctgctgtcaggtttatcgacgtgacgctgcggggatgtgctcaggtcatgtttcagaataacccgctgaccgggttaatcttctttattgccatatttattgccgcttacggcgaaggcaatcccgcagcggcctatggctgtgtgctgggtacggtggttgcgacatttaccggtatgttcgttaacgatcgcacctcatggctggccggactatacggatacaatggttgtctggttggggtggcgctgccgacctttttatccgtcacgccgcagctttggggctgcattattacaggcagcatcgtgtctgttatcgccaccgtcagtattgccgacatactgaaaacctggaaagtagcggcattaacggctccctttgtgctgacgacgtgggttgtgttgctggcaagttatgcgttttcaggcctggatgcctccgggttatccgtacctgaactcccccacccgttagttagtgctccggcggggggctgttcaacggccacatatttgccacggtattacacggtgtttctgaggtgtatttattcagcagcgtggccgcggggggattatttgttgtgggtctggcggtggcgtcacgttgggcggcgatatttgccatcggcggttcgctgctcgcggtattaactgcctcactgcttggagcgaataccaccagcaccgacagcgggttatatgcatttagcgcggtgctcacggccattgcgcttggctcaagtttcaataaacccagctggcgagttttgggttacacctttatcggcgtgatatttaccgttttcgtgcagggagccatgaacacattgctggcgccggtaggcatcccaacgctgaccatgccctttgttctcgcttcctggctctttctggtgccgaataaagacattatgccggcccatcgtcagggtcactaggtagatgtgaccggcgcccattatcgatattgctgaaaaagcagagttgcataccaggcgtcagggcattttttattgactatgcattgttacaaggaagccgcatgcctcacctactaaaagtaatgtcatatacttttgcgcttatcgccagcacgttaccgttttatgcgcaggctgaaacggactcaacctcaggtcactcactgacattggctattggtgaagagcccagtgaaggctttgatcctttactgggctggagccatggaagcacgttgctgttgcatagcgcgctgttaaaacaaaatgtcgatatggactgggagaattttcttactgaacacgtcgagcacagtgccgacggaaagatctggaccattacgctcctgccggatttgaaattctcagatggctcgcccttaacggcccaggatgtggcctttacctataaccaggccgcgcagggtggcggcaaaatcgatatggggaatttttccgccgccagggttctggacgaccgtcgggtcgagattaccctgtccgcaccgcaaagcacgtttgtcagcgtattaggatcgctggggattgtgcctcaacatcaatatgatgcaaaaacctatgcgcaaaatccggtcggcgcagggccgtatcggctggtgagctttcagcccgggcagcagcttatcgttgaggctaatccttattattcaggccaccgaaacgacttcgataaactgatctttgtctttctggatgaagacagcgcctacgctgcggcgcaaagtggtcagttaggattagtcagagtcgcaccatccgtttcggttacgccgcaacagggcttaacactatgggtacgcccaagcgtggaaaaccggggcatcgctttccccaccatacctgccggtcaaaaagatgctaacggatacccgatcggtaatgacgttactgcggatgtcgctatccggcgggccatcaactacgccatcgatcgtcaccttctggcaaaccagcttatggaaggtcacgcagtacctgcttatagcgcggtgcagggcttaccctgggacaatccccaggccgccttcaaagatggtgatctcgccacagcgaaacacattctcgatgatgccggctgggaggtcggagaggatggcattcgtgttaaaaacggtaaaaaggcacagttaacgctgtggtatgccagcggagacagcacccgtcgcgatttggctcaggccgtcagcgcgatggtgaaacccctcggtatcgcgatggagctcaaatccggcagttgggaaaccgtcgagcggcatatgcatgccaatcccacgctgttcggctgggggagtctagatccgatggagctttaccatcattacagcagcaaggcggcgggcgttgagtattacaatccgggttattacagcaataacgccgtggaccagcatctccagcaggcgctcaacgcgccaacgtggcaacaagcggttcctgtctggcagcaggttgaatgggatggagagtctggcgcgggcgtgcggggcgatgccgcctgggcctggctgctaaatttacaacatacctaccttgccagtccgtgtattgatttaggtaatgctgctcctgaaattcatggcagctggtcagtgcttaacaatgttcaggactggaaatggacgtgccagtaaagcattttttaatgaccaggctaaatctaacccgatcttacgggccaggtcctgttttgattgctgtcttcaggctcgccattctgctgatactggtatcggccggaacctttacattgctgagtttttcaccggttgatcccattcgtgcctatatcggcaatgatttgctgcatgttcccccccaacagtaccccctcattgccgcacgctggggactggaccaaccgctgtggctacgcttctggcattggttttcgcaagtcatccagggcgatctcggatattcaatgatttataacgccccggttgcccaggttattggcgaacgctttgccctctcatttatcctgttagccagcgcctggctgctgtcagggttgttagggatcatgctgggattgactgccggacgttatctccaccgctggccggatcgcttaatctgccgcatcagccacctgttgtcctcactaccgacgttttgggtgggcttattactgctggcgatatttgccgttcactggcaatggtttccggtttgctgtgcctgggcaccgggtcagaacgccgacaatgccagcctgggggagcgccttcaccatgtcatcttgccgatggttgcgttaagcctgaccggcattggacaaattgcactgcacactcgggaaaaagtggccgaaacgatgcgcagtgactttgtacactacgcgcgagcccagggcgagaaaggctgggggctattacgggtacaggtactccgccatgcattaacccccgcgctttgcctgcagtttgcctcagttggcgaactcctcggaggctcgcttctggcagaaaaagtgtttgcctaccccggactggggcaagccaccattgatgctggcctgcgcggcgatattccgttgctgatgggcatcgtgctgttcagtaccgtgctggtattttgcggaaatagcttcgctgcgatgttactggccagaacaaatcatattctggagccgaaatgatgcagaataatcccgctccggcattactgcgttttattttttcatccttactgctcggcatgatggctgcctatggcgtttcattgttgtcagtggatgtaccgatagatctgcaggcacgctatcttccgcccggcgccagccactggtttggcaccgataatatggggcgcgatctgtggttacgttgctttcagggggcattgaccagtttgcaaattggtgtcggtgccgcaatctgcagcggtgttattgcgatgctgatcgccagtctgacgcttatccatcccgtgatggatcaggcgctacgattgatcattgataccctgctctcattaccccatctgctgctgcttatcctaatctgctttacggtaggaggaggaatgcggggcgtggttttagccgtcgcgttcacccactggcccaaactggcgctgatcctgcgagcagaagcccagcagattcggaccagcgactacatgacgctggctcagcgtattggaaatactcgctggtactgctggcgggcgcattatctgcccgcgctttcatcacagtggcttgtgggaacattactgatgttcccacatgctgtcttacacagcgcagcattaagttttcttggtttcggactggcgcctcatgatccttccctggggattttattagccgatgcgctgcgtttctttagcaacggtagctggtggctggcgctgtatcccggcctgatgctgctgttaattgttttactgtttgatctctgcgtgcgcgccattcgcgatctgtggttaaggaatccatcatgctgaatttcagtagcatctacgtcgaccatgtacattacacctggtttggacgccaacagttatcgcctctccttagcaatattaatctgtcagtcaagcgcggcgaaatgacggctctggtagggggaagcggggaaggaaaaagcctcctgctgcaaacggctctggcactcttacccgagaacttacggatgcgtggggaaatcagactggagggcaaagcgatagattcccgccattgcgcaacgcttcggggtaacacactttgctatattccgcagggcgtcggttcgctcaacccccttctgaccgtaggcactcagctgaagcgaagcctgcacctcagtggtcgtcatacctgcgcactggcgctagaacagcaaatcaaacattatcatcttcagcacgatattctgctgaaatatccccgccagctgtcaggcggcatggcaaaacgcattctggcatgtaatgccgcattaggaggagcccggtatattctggcggatgaaattacggcatggcttgatgaaccgctggctttccagctcctacatcagttacgcgatctggtggctcagggggccggggtgctatgggtaacccatgatttgtcgctggcggcacgtttcgccgatcgcattgtggccctcagtcacggacagatcagtgatgatatggtcgttaacgaactcaaagacggcggtggaagcgcagcattgcgacgtcagtggttggccctgccagaacaccaacgcttattttccgatgaggaaatgcctgtccaggccgggggcgtgtaatgttttctgtttcagagctcaccattgagcaagataatcgcccgctgtggcaaaatttctcttttgaattgccggcgggtgagcggttgggaatttcggcaccgagcggctatggtaaaaccatgctgggacgcgtgcttgcgggctggcagtcctgccgccaggggcggatcacccttgacggccttcctttgccaaaacgtggttattgtccggttcagttagtgcctcagcaccctgaacgcacatttaacccttttcgcaccacgggaaatgccttacgcgatgcgtggcagccggatgatgaacaactggcgcgttttcacgttaaccccgagtggttgaggcgaaaacctgctcagctgtccgggggggaactggcccgtattgcgctgctgcggtcgctcgatccccgtactcgcgtactgattgccgatgagatcaccgcccagctcgatccttctgtgcaacgggatatctggcagcagttaatccatgaatcccgtcggcgcgggttaagcatcattatatttagtcatcagacagcgcttctggagcaaataagctcacgcatgatgatagcctcgcgttaagcacagcgacttagcggatagttgcgggtatgatctgcagggacgagtcgcttaacgcggatgcgaaagcgaaatcgatgaagtatttacttagtcgcaaaaaaacagagccacgttataacgcggctctgctactcctaacattattgcggaataagggattgtggcattcccctgggattaatagatttcctttttcagattatcccattcagcacgaactttatctttgaaagacattttcttgtccttctggcaagcctgaacgattgtcggggtgactttttcaatcccagaaacgttgagaaccgcatcctccggtttgtctttagaattcagcgcttccgcaacccccactgccgtaggctgaaaatcttcatttaccgccagaaaatcttcacaggtccaggaattaaccggcttcttgtggtcagctgcatgggcggcagaggttaaaaacagtgcgccgatggcactaaaaaccaatgatttaactttcatttattcatctccatcacgttatttaatttacaagaccgtacgttgacaacctgagccctccatcatttactggcaaagacaggcgatagccagttgcacaataaatggtatgaaatagcagacaggttatgataagcatgcagccgacagaccagctgattttatgaaggtcaaaatcagcacagcgtaataatagtgttattcaccattaaatggagccgtatctgttggcacaggctgcaagcaataataatatttataatcttaatagtacataaacaatttaaacaccaagtgtaaaataaagcaaaggtggcatagacagacaaaccctctcgatattctcatcattctaccgcgccatttattaatcgtttaggcttgatattaaataataaccgtccatcctcaataaaaccaggatgaatgcgttaaccgcagagcacaaacactgggataattccttcccgtaataacctttatccaaactgaaacagtctaagcatttatttcccgcacagcttgtgaaccctctgcacacaagcatggtaaacgccatcactggcaaggttccccgacatcgaaaacttcatggaagcgtcagggaaggatcgccaggccagtgattatttttaggatgattatatgcgtaacgtgacaatattcctgctgttcaccctggtttgtttaacctggggtaccacctggcttgccatgagagtcgccgtggaaaccatttctcccatattcgccacgggcatgcggtttatatttgcctccccgtttttaatttccattgcgctgcttaccaaaacccctttagtttttccagaaaagcaacgtatatttcagggtgtggtgtgtattttttattttgcgataccgttcactctgatgatttatggtgaaacgtacgtgagttcaggcctcgcctccgtaatattttcaaccatgccagtcgcggtactgatcgcatccattttctttctacacgaaaaaccaaagttattacaaatcttgggcctgcttatcgcgcttatctctttgtctggcattattcttcatgaggcaaagtcaaatgccggtagccagtggcagggaattgtggcgctggtagctgccgtgctcatccacgcggtgatctacacccagagtaagaaaagatgttgcaccgtttcagtgctcacttttaatgcccttccctgcttttttgccggtctcatccttaccgctgctggatattttctggaacatcctcaggtatccacattctcattgccctctgtgctgtccacgctgtatctgggagtgattggtggggttttcggcatcctgtgctactttttgctgcaaaaaaaatcaggcgctttccaggcctcactggtgtttttagtgtttccaatcattgccataagccttgaaaattatatttatggctatgcgatttccttgctttcgcaacttttaacgctgccgctcgccatagggatcttacttatccttgtgtctcagcgggttcgtcgctgaaacagccacgctgactgaaggcgcgggcagatcacctgccagcgccctctcctatgcatggccagatcgtgccttttatcgatgtttatcaattatcagaagcatcacccattatgtagacttgcttgatgcattacgggcgcgaaatccaggctatatgcagcatcatagacaggaggttatatggcagaagaaaagaaggggctcatatgaagcgcccggatacagaggtgcgggcctcccctgtgaccgggcgctatcgaagtcgtattgcaagaaaatagtgaccaccaataagtggtcactttttcgggatgaaagcgtccgctgtcgccccgatcttcaatatgcaaaaatatcaatagtccctagggaaaaataatgcacgcaactctatttccccaataattatctggatgagttttaccagcttaaattgctccctcaagaactttatctggttcaactgcgacctcaccgccactggttaatgacatatttaatccccccaaatcagagtgatgccttttttgaatgctcctctgaaagctttcgtatcagtgaaaaaaacttgactatcctgtgtaattacaactcccctggatgacgcttttattgccagtaaagctcaagtgttgcagtagctgatgctaaacccggatttgcatcggatttcggacaaagcacccagaataacggctcggaccaagaagaattattggtaatggtccgcagaggtttaggtgttccatccatcaaaatagaagtgtttttgttgacgcaacctgcttcggagcctgcattctctcccaggaagccacgtacgcttccaacagccgcaccgccagatttggctattaaaggtatactcgttttatcccctttttgacttttaggtgtgaatgagtatccaacagtcgttgatactggcaagcctcctgtgctgctgcagttaacagcaaaagtggattgttgactgatgccttttgcagcagtttcggcatctgacgtaacacttccaaaatcgactactgccggaacattcaaagtacaattaacagaagggaggttcaggtcaaaacttctggttacagcgctattcattccattagtcagcaaaccaaaatacgtttgatgtatataaaccgttttctgaaaaggagccgctgtcggactaacataaacaccatagcccatattaaattgcgctgtgccataatcatagttaattgcttgccagtcattattattaataggattattccctttaataaaagacttacaactccccctggcggctgaagatacagcatctccggatattattcccttttgatcccatgaaccatttgctatgcccgtcgccatcgtattgggaaccaacgcctgataatacatttgagaagtaccactgtgagtagctgcagataagcgaaagggggtacgaatagatccatatggaataagcagaactcccggcgaaacctcataacccgtataaccatcgatcgttaaataaggtaatgtgttattacagtaacgatcaggactgctcgcggccgaagcatatatgcttcctagcagtcctgatgaaagattttcattcataaatgcctggatattccaagcccatccggttggcggattacgagagtaattacctggctcagggataacgctggaagaaatgttggtaactgagggtgtctggattatctgataaccggaagacaggttcaccgcagaactcgttgatactcctgcccccccatatatagttaatacataaaaagcccattttagcaacttagtataatnnnnnnnnnnnnnnnnnnnnnnnnnnnnnnnnnnnnnnnnnnnnnnnnnnnnnnnnnnnnnnttatggtacttattgcaacatttaatctcgactggcttatctaaagtcgatatgtgaacaatacgtttagttatagcaactttattgagttcagacataataatcccaccacgaaaataaatagattatttagcatacaccggccatttcacctaaatatcaagtcacctttagcaaacactacaataataaattttgaaagtgatgctttataatctatagtgcattgacatactcaccctggttcactggcattgatatcctcaacgcaagaataccccataccatagaaaagcaatgtaaataaaaacactccctattgaatccattattttatcagtagccccactaatttacatcctttcaactaagaaaaactactgtttattcgtctgcttcacaaagctttcttcttttacggctggctcgtgcatctttatagtcacatcatgctcaaccggtgcggtatcttcctctgtctgagcactttcattaatatcctcagttctgggtctttcgttgctctgagatgttggggttgtcaaaatctcattcttagtggtcatatctgcagcctcaatatccgatgacggtgacgctgtcgtagcctgttcgctataaagcgtgtcagcttcaatcctcttcgtgccgttgattatcagtgcgtccggtgatgctacttcactcgccacgtccgtatcgatgacgctttttacgttagcttcgggttcaactgtctccggcgttggtttaacatcttcctccgttgctactgcagtttcagacgttacatctgtcgcaacactgacgtgatccttgccagctttatcctccactgaaatccctctttgctcactcataacagcaacaaccggcgtctcatccggcatgtcacccgatttagtatcagtttgttcatcctcattgtgagatccgagccgaaccggtggcacaatatgcggcgcggcagcagggttactgctcgccaccatcagtatctcgaagggactctgtttgcctcgttcattcaatacgctgagcaatctggcggcctctggatcaccctgcccggcggctttatccgcccagtaacgagacttctccagatcgcgatcgccccctagtccttcgctgtacatgaccgctaaattatattgggcaagcacatgcccctcattggctgcgcgttcaaaccattgccgggcttttacatcattcttctccagcggttcacccttgctgtacatcacgccaagcgtgtatttgtcttcaggcgaaccatcttgcccggcaagctcaaaccagaaagccgcacgaaccaggtctttggcagtcccaattccctggccgtagatcatgcccagattataacgggcgccgatatggccatgctctgccgctttttcaaaccaggtaagcgcttttttactatcacgcgccacaccatccccattgccgtacatcacgccgagattatattccgcatcggcataattttgtttaccggcctgttcgaaccacgaccgcgcttttttataatcacgggtgacaccactgccttcagcataaagaatgccaagttgggtttgggcagaggcgtccccgctctttgcctgggaaagcatcgctttaatgtcatcattatttggcgtagcccaggcgtgcgggctgatagcacccagtgccagaaaacagataacacttttcattttattcatatcgatctctcttgctgcgctgctgcctgaggccaggacataaagcattttcattaacggcaatcgccattcatttgaattaccggcatttgtgccgttggcttaaggccgttaagattaaaattcacccgacactgcttatcggcgcctttaccccacaccacggacaattcccctttcaccggcagaccagccatatacacctggccgttatcccccacgatgctggtcgcatcatcacgctccttgttattcaacagcgaaaccgtcgcaccaaagggcacaacgcccatcccgcccacgcgcgtcagggtcattaatacctggtaaccgatacgggtagcgaaatcggctttcaccactgcgcctttcgtcgggtaaacttcaacgttggttttcggcaggtccacattatccggcagggtgctgggatcgaggccgatgttgttgctggtataatcggaaaggtaaggcgcaacggcaaaaccctgccaatcggttacgccattgccgctggtaagacggacgccgcttgcttccggtgcactgaccagcgccattgaacttccaagcgttcgcgacagcgtcaggccttcagagtgcgcaattgcccctccggtaatattcatgttcattgaacgcgtatcatgggagtagccatagcccgcgttaatgctgcctttgcttccctgccagcccatattaaggttgctgttactggcctgattttgattgccccagttctgcatcatgctataagaaaaattcccgttactgccggaaataccggcctgattcagagtgcgcccggtgttatcatgcgaaatctgagatgtggcatagacgttttgcagcgctggcgaatagctgaaaatactaaaaggtatgttcaggctgaatgtaacctggcgattctctggccaactcccgttacctttcatgcgatcgatggtgtaataaagcccataactcactcctttaaagccaccgttgtacccggcagataaaccagtcagcgtcttagtggagccccagtattcatcgcgatgcgcacgaaggctgatggatcccagctcccccagttgctgagaaacctgagtctgaaaactactgcggcgacgatccggcgtataaaaaatatcttcatcgcgtctcgcataacccatcgtgttgtattcgctaaaggtataaaagttcttcgttgaatagcgcagcgccgtcagatcgattgacgtcccggtgctaaggagactttttgagtaacgcaaacgccacgatcctcccgtttcacgggattcaccatgaaatttggcggtggataacgtcgcgtccgcagacaccgcgccccagtcccccagcgagaccccgcttcccagggataatgcggtgtaatattccgataccagaccaccgccatacagcgtaatgttttttggtaacccatagattagggtgccgaggacaaaattttcctgacgcgaaccataggtgagcccgccatcgtaacgaccggcagtaacttcatatttgaacgtgccagggcgtaacatcaccggcagggttgaatagggcaccacaaagctgcgaacactgccgtccgcttcggtgatcgtgacctccaggtcgcccgacattcctgcctgataaaggtccttaatttcaaacggaccgggtgcgacataggtttcgtacaccacatagccattctggcggatggtgacacgggcattgctgttcgcaatcccggtaatttgtggcgcaaatccacgtaaacgagcaggcagcatctgctcactggactggagctgcacgccccggaatggtacaccatccagaacttcgctgccggtactggattcaccgatagttaaatgcgatcgccatgcgcgaatatcacgcatcagatacgtattagaaaaacgcgtatcatcggtatgtctgctctggccgttacgcccaccattttgatctgaatagttgtgggtgatggtgctgcgaagacgccatgctcccaaattcgccccggtttgtacgttggcaaataggttattcatatggcgagagtcgttattgatattctgttcggtacgtccggcgctcaggctgtagttgaacagtaatgccggtattccgtcgtcccacagttcagggtccatacggctatttttgcccggctgcattgccacctgcggaatgctgatatccagacgcagacgcgcaatatcaagcttgaccgatgactgggggatgagttcggcaagatccttcaccggtttatctttcggcaaatctttaaaggccggtaaatggtcaacattcacccccaaatcattgagcaatgcaggcgtcagctctgcgaccactttaccctgcgcgttcttacggaaagggatcgtacgcgacatcgccatacgctggttaataaagatattgaccaggtaatcgccttccaccacgcctccgggattagcaaaggcagaaaggtcgacatcgctggttcctgtaccaagcgcaagcaactctggatcaaaatagtccgtcgcccacgcgctgttgcagctcatgaagacacagagagagatcgttttcagtgggaaagtgtcaatcctggcaaccctggcgttgcttcctttccgggatgtcttttttttaatcacaatcgttgcctgctttttatctggcgttaacggacggttcttcatggtgttacagagcctggtgctgaagcggtgtgggacggtgttcctcatccagcacctgccactccaccggcccgctcatacccttgacaaggtcataacgttgttgaccataaggaggaaccagcttgcgcaagccatccgctgagatcggcttgcctcccaccgtgacctggctgaaattgatgtaaaatggcgtcgggttatcgaccaccaggctctctccctggcggctgaatcgcagctgcgcggcggctttctttactcccccgcaggtaacccttcagggcgataaaacagcttgatattgttcactacggccaccaccagcttcccgttactagcgctgtcgctatcggttaccgccgggattgcttttaccgacaggtaaaacacggattcacgatctttcggcagggacaattccgtgaggcgaatacgcaatgtcatcccttccccagcgtccactcgctttaacggcggtgtcaccagaaaagggattttggcgctggaagcactactctctgtttcaggcatcggcaggccggtagtaaagtccaccggacgtatccaggactggatcagccaggcacggtcggtgttattcgtcagcgaccaggtaacgcctttggtgtccgcgcccggatagataatccggaactgactcagcgaaataccggacgactccggtgccacagcaaagcaggatggcgtacaggacaatgcagcaatcaatacggctgacgtcagaggtaaacgcattaatttctgcctccctgcacagcagactgatacaacttgctgctaccgccgtaatcattaatgacggaccactgagcctggcgtaccattcccttcgccggatatgtcgcctgcgaaaaaggcgcaatcattgatacgccttcacgcacattcacatccgtgccatcaaaagccagtcgcgaaaacgtcaggtaatagggagtggggttatttacctgaatttttccgttctgctgctgaaaggttaatttgccgcccgcttcttccgcagtcatagccagtccgacagggcgataaaatagcttgatagtattttgtatgccgactgaaagacgcgcagacattgttgcgtcatgtccctgattcggtttatcggtcgccggtacagcaatagcggtaaaatagaaaacggattcacgatcggccggtaatgccgcatcaccacggcgtaaaatacgaattgcgctctggctgtcggcttcaagccggaacagcggtggtgtactaataaacggcgcaagctcacggctatccggtgcggtgataatcgctgactgaaccagataagggcgcggcccattatttttcatagacagcgtttgtgctttatccgcagaggtaaaaataatgcgcgtacggctaagactgatcccaccatcagcggcatatacgtgctgaacagcagctatcaataatccactcaccagaagagtgcgctgcaagagacggaaaagttgatgcacttaagcactccttactgataagcaaaagtaaaggtaacgctggcattcagggaaccaggcctggtggttgcgtcattacatttagtgccacaggagagcgtggcggtgagtgggatcgtgtcgctgccaccatcaaaatttgtcgacgtcagagaggccggtaaaaaagtgttattttgtaccaccgcttttgatgcattcttaataagaacgccataattcaccgactgagatgtcgctgagcgaaacagaaagtcacccgacacagcagaacccgcgccggtcactttaattccgggtttttgagtcgtcccaataaagccggaacattgtgaaagcgtgacgtccagcgataattcctggcttagaccttgtttaatctcggaggaaactaccgatccaaaatccagagtagcaggggctgaaacttcacaggtcggtgcctgaaatgtggcggtaaaggtaatatccacggccctggcgctggtcgcgaatgtcaacagacccaggcaaagtgccactctcgagacaacaccatgctttaaaaatccataatattttttcattgtgttatgccatgaaagcgttacggaaagacaaaggcgaaattgattttggcgttaaccgtcccgttaccaatcggcggatcccctgccccatgaaccagccctacggtaaaatgctgaacagaatcaccatcatctttatcgatagcaatcacatcgccgggggcgaccgtattaggcgcgttatagaaatcgcccagatcggtgacggttccctgcttcaacataaagcctgcataattagccgttgaactggccgacctaaaaagccgttggtcgctaacgcctgacgaatcgccgctcactttgaacgtgggcgctaagccgctcatacccgagcaactcaaattcacgtcaagtggttgcacctctgccgttccagtcgcaaattgctgggagccttttgtcgcaaaaacaatttcggtagtactgaaagagatatgacaaattccgtcgataatatcggccgtgatctctgtagttgccgcccgggctggattcacagccagagcgatacataagagtgcaaggcctggtatgtatcttttatttaatgaccccattaaatgtttctcctgcaccaaaatcattaatcgcagtccattttgtaattccctgccctgcagctaccggatacgtattcgcagagaaaggggcaatcatgctcgtccctttaattacatcgagtttgacagaacgaccgttaaccacgagattcctcagcgatatgtaatagggagtcgggttaaaaacttttactgaattgccagcacgtgtaaattctaatttgcccatagcttccttctgcgtcataggcaaattatccggacgataaaaaagcttgacggtgttacccgttgcaacctgaagggtaccgccaagagaattccccgcatcagcctcgccaactttacctgtcggaatagccataacgttaaaataaaacaaggactcgcggtcgcttggcaggttatacgcctttttcaggatccgaacggtattcctggaatcaggctcgatacgaaaaagcgccggcgttggaagaaacgcagtattggcggttttggcattgagcgtatccgaaatgccgacattaataagataggtttggctggttgaactgttattaatgtcgacactctgactactgtttttctcatgaaagataatccgtgaggtaccaatgcttatccctgccagcacgggctgaacacataagatacccaaggtaaaaagcatgcctagtttttgatataatttcatgatatttgcaatcccaaaaatgaaaagagagaacggagaggaactctcttttcaaagagtaaattaattagttagtaacgtaagaaatcttgatcggcgcgttatattcgcccggaacaatatcagcgatatccattacggtcatacctgcattgaaggtataagtcaggttaccatctgcatcagccgtaaccggtacagcctcgttgtttttaatctgcgtcgtaccatcttccgcagtcagcataaagccagcagattcgccggtattgctcatgaaaatttcgctgtcagcaccaacaataccggttacctgcaggccgccctgttcatcagcatcacactgagtcagagaaacctgcagcgactcctgaccaacctgctttttagcagtgttaaatgcggttttaccaaaagaacccacattcagctctgccgcaccgttgttaacagtgatttcacaggtagtatcaacaatggtaccgcgcagcattacatcaccttgagtggcagcttgtacattgctagccagtcccaggattaatgcaacaggtgcgagggtgataatttttttcatagccaagtccttcattaaataaagattacaattaaattcctgcgcagcctaccgtggctgacaatgcctatcttaaagattaagttaaattaataaatgagagcgagattatttcatcgagagtaatttcctacattcgtaggatgacgcccacaaatcgtgtcatttttaataaatacagcctcggcaactaacaaaatactacactcaagcctttaagtaacgccccaatgtctcagcagttgtatgaacctttctttcgcccaaggttcttttacaaatttaagtcattaatactcctgacattaggcctgccggattaatactacttgtgtaggaaacgccctacattaaaatcaccacaatcttaaaaaaaactttcgcgcttgcattttagataagaggcctctattttttacgaaatcgtgcggcctttaataaaagtttgttatttacccaatacacagcccgcattgactgaccaacaccagggggaatttcaatgatgagtatatatgtcagccttttaaattaaaattttgacttaagtcacactaaatgtatctggtttattcaaaaggatgagataacgaagttatgaccaccaatgctaatcccccactgaaatatttccgatatacaagcccttgcgctcagcaaggttaatgaagtttactacgctaccgcgttgtttgtatgcgttgaaagtcgcgcttgtctattttgggaaaagtaacagtgagttggtaaacgcacatacccccttgcgccgaccagggaataacatcagtaaaaagtagcataccaggaagttacataggatccggctaatcatataaagcaataattcaggccgtaccatgataacacttgcttcgatcacctacaaaaggatctcgaaatgaacagaagtacccccaaaatgagtgcagtcattattgacgatcatccgtttgcacgtttagcactaagaaccatcctggagaaccaaaatatagtggtaacgggtgaagctgcagatgattttcatgccatccagctggttgatcggttgcaacccgatatcgttatcgtggatgccattctgattgggtcgagtggaatcgatgtggtgacaaaacttcgccaaaatcactacgctggcagtattgtcatggtgtccggaaaaaaccaaattttttaccgaaaatgcagtgtcgatgccggcgccaatgcctttatcagtaaaaaagaatcaatggataacatcgttgctgctattcaggctgtacaacgtggttattattactttcctttgccatcgcataaccttactcctgctgaaaataaaatactttcattatcggaacaggaacttaagataatgagacacatccttaatggcgcacaaaatcaaaatattgctgttgagatgaatatcaaccaaaaaacagtaagcacttataaaagacgtcttatggtaaagctcaattgtaagacacttaaagatttattcgtcttttcaaacattaacaatatcggttgaaaaatgatatctcgaattattattgcgctggcgatgatattgctgatcggccaaacaacagccgctacgactgaaccaatcacgctgaaactgaccagcaaagcgcacagctttatctctaagcttccattaagtcaggaggatctctcgtggcttgccgataaacgtaccatgacgattgccgtctatggcgaagaaaatccaccttttgccatgaatagtattaacggctgttatcgagggatcaatgcagattatttgcaattgctgaaagacgctttgcacgttaatcttgtgcttcactattatgatgatgaatctcaggcgcttggtgccctgaagaacgctgaagtcgatctggtactgacctcagataacacctccgttccagtcaccaccccgtttattatcagccagctattattccagacctatccggcattagtgacacgcaattcgaacggaattatgccattttaccagctcgataaaacggtgaacgtggcagtaagccaacatcatccatcggaaaacttcattaaatcaatattcagacatgccaatattgtctcctatgacagtaattatcaggcattggcatctgttgctaacagagaaaatgagtatttcattggtgataatattgccagcaattttcttatagctcgggatttttatcaaaatctagatgttgttaaatactggcgctcaccgttaacgggtagttattttatcgcacgagaggatcaatccaggctcgtcgcgataatcaataaatttatttcagcattagatgcatcgacacataccaggatctcccatacatgggtggatgatggtaacctcacatttttaactaaaccgctatctttaacgccaaaagaaaagcgttggatagaaaaaaacccagtcctcaggactctggtcaatccttattatgcgcctttcaccgtactggatgaaaaccgggaaattcgtgggttagtaggggatattcttaatcttgttcaattacagaccgggctgcattttcaacccgttatcgcaaaatccaacagtgatatggcagagattatgcgtaaaggtgactgggatatagtacctacagtgacctatagcccggaacgtgaagatgaaatggcctttacgcagccttttttttcaacaccttatgttgtggtgaccagcaatgaaaataagcaaaaggatattttcaaagccggttcaacgatcgccatacctgcttattattccttacgggaaaagctgattcagaagtatcccgacgtccattgggtcgtcgttgaaaataccagtaccgctctgagtagtctcaatcttggtaaagtggatagcgtggtgaccacccaactggcggctcgatatatcatcgatcattactacccagaaaccatgagctatcaacggatccccgatcagccttccgcacagatcgctttcgctgtacctcgtgataaacccgagctacaaagcatcctgaacaaagcgttggccgaaattccacctaaggagatgctaaacctggcaggcaaatggataaaaatgcctgaggtaaaaatcgatacctgggatctctatagtcgtcctttttatattttgacgattagcgcggtattgctcattttgagcagtttactctggggtggttatttactgcgcgccattcggcgggaaaaggcctcgcaggcagcgctggaataccagctgagcttacgtcagaccttatcgaattcgatacctgtccctgtctatattacgacgccggaaggagaaattgaaagttacaaccgtgccttcaacgcgttttttacaccacaacaaagagaggctatacattattccctttttgatcgccgaagcccgcttgtacatatctttccgattattcagcaggaaatgcagcaaggattggctccggatacggtggcgtcacatcagtttacactcaacaacggtgccgaagaccgtaccattctgcactggatgacattgtgcccgctgccagtgccattaccacccgtgctgatttgcggctggcaggacataactgaatcccgcaaacttatggaagcgctgcaggtcgaaaaggacaaagccattgaggctagccgggcaaaaagtagatttttggccaaaatgagccatgaaatacgtactccggtcagcgcaattatgggctttctggaactactggcaaccgggccgcaaagtgaacgagaagcacaggaatcacttcagctggcttatgccacggcgcaatcgttgataggactgatcggcgatgtgctggatatggaaaaaatagaatctggcaattttgaactgacaccggaatgggttgacatagaggcattaacccaagccacgatggccaattttgctggccttgcacgccaaaaaaacctgcatttaacggtaagttatcaattgaatgctggaggcatactgtggctggatccgcaggccattaagcaagtgctcgccaatttcttaagcaacgcgatcaaatttacggttagcggtggtgtagaaattaaggtcgaaacacaacctcgtgaaaatgatggagctcagctgatgctcagcgtcaaagatagtggcgtagggatcagcgaagaagaacagcaactgctgttcaaacctttcagtcaggccagctgtggtaagaagcaaatgggctctggtctcgggttaaccatctgtaaggaactgatggatcgcatgcatggcgccatttcagtggccagccaccctggcacgggcacaacaatgagcatatatgttcagactcaagtttctgagcgagcccctacagatttaaataaacaggaaatgacccttcctgtatcatcagggctacgggtcatcattgctgatgataatcctaccaaccggctattactgcgtcgccagttagatattcttggctattatgtggatgatgccgaagatggtgaacaggcattcagtttgattaaacaacgacagtacgatctgctgataacggatctcaatatgccgggaatggatgggcttacgctcacccagcaggtaagaaagattaaccccacactcgttatttggggtttaacagctaatgctcaacctgacgaaaaagtacgttgtttggccagcggtatggatctatgcctgattaaacccgttaatttgccgcaactcgctgccgcttttaacaacataacgaagcgtctggaaaaatcaattctttctggaatatcggcgtcattaaacacaccatatgatacgacagcctttaatgagcttatcgatatgcgggtactacgggataacgcaatggatgatacagcattcatgcttgaattaattaaacaggcataccatgagaatatcaacgatctggcggcgcttaaaaaagcaatgtccagtggtgaacgggatatcgttcaatatcatttacatcgtcttaatggtacagcacagttaatcggcgcaatttctttacaccatcttgcagataaattagaaaatgcgctggcaacagggcaaccgctttctctgatcgagcaggatatacaattgcttgaacaacaattgattgcattaggaaagataaccgctgatttttttcagcagaaatagacttatcttcacaaaataaaggcaatcggtagctctataaacaatttacaggttagttatccttacgggatatatgtaaatggatactctggttccctatacaacggcgattggtatttgccatcccactggctgcgggcggactatttgtggaacacaaacacccccgcgttgttcctttgaattaaaaagataaaatagtgataaataaaatacagcgacctgtaatcaacttaaaaatatcacccattgcgctcacacttgccatgctctttccatggatgataagtgtcattatgcaggagccgggatccgggagtattgcctcttttggtgcctatatgatgatgatttctttttcagtattgcctgcacggaattcactcctgcaggtattcactgcggccgcaataatgatctttttcgcggtgctgggtctcagtgccccaagcggctcaatttattttttcctgttcaccatcctggctgccctggcgcaaggcatggctgaacttcgtggagggaatctacgcctgccggtctcactggcagctcttgttttttttctggcgcacggacaatcatcctcagaaaagttaagtcagtacattttttccttcggtctgggttgcctgtgggctattccctttattctgctctttatccccaaaaagcccctctcaccagctctcactcccctttacccattgaagtcaccgaaacaacgctggtttctattaggcattaccctcaccgcgttgttaggaagtgcggccgtgtcgcttattccattggcacatgcatgctggatccccgcagcctcgctgcgggtgattaaacctgcatgggaggaaacgcgatatcgcatacataccagaagcatgggaacaatactgggagccattgccggaagcataatcctggcatgttatccttaccccttgtttcacttaaccattgttggcgggatgttcctgttaatgttacagtttggggccaaaaattacttccgctggtcattttgtctgaccacaattgctttagccttcaatcctgccgtcggcaacgatatattttcattggctcaggaacgagtgcttttcactatcgagggaatttcgatcgcattcattatgatgaagatgttgtcgtacaaacggtcatagccttgtggttcgaaaccggtgaacgcttcagccacccttaaacaatatccagaccattgttgaagtggggacggtagtattccatcttcattcaccttgttggataagaaaacatatcaccctttatctctctaagtgccagattacgctctcagtacaggatatattcatcgggtttggcgagtggctgctcgaataccagaaatcaatcggcagccagacgttatgatacgcgacttcaaactacactatgcttacactaaataacaaccgctgtttaatcccctttcaactcgtcacagcgagttgtcatctgcgatcctaaaaaatgaaactcctatgctccttatgcagttatcttttactcagcataaccggaaagagcaatttgcatggcattcatttcagttagtggcatacgattgcattacctttctatacaagcagtcattgctattaccggctgacacttttcgccatgaacaataaacacaaccgccaggctatattattggtgaacttatcacaatatataaccctaaccactaaggagtaatcactaaatataagcatatgattcccacatagctattcataaatataggcgttatcaattttaaatgtattggcaaacccaataagttccaccagcgtttgacaatttagctttttcatcagacgacttttataagtagaaacagttttcgagcttatatccattttggtggctatatgtgaattactatcccccacgagtaaatatcgcaatactatagtttcctgctcggataaggcttgtagcttattcctggcaaacgtttcctccccggaagcattatgttgcgaaaacggaaaataagaataaccatcctgcgcagccagaacagcggaaggaattacattcatcgatccttttttactcacaaaaccattgcctccagcattggcagcacatcgggaataaaaatactcgtatttattcgaggtcacaatgatgcttcctttatactgacgcttacggaacgtctctaccagttcaatcccgtcaatatctggcagatcgacatcgataataatcgcatttggcctcaattggtcaacaaggctaagagcatcaataccgcttatcgtctcgccagtaacggccactccttttttctccagaatggattttatggctatagattcgagaggataacgattaatcaggaccacgctgatatttctctcttcggttagagttccatcatttaaatctggcatttatcttgaacacctctttcgctgatggcctttttttgatcttcatacaaacgaactaaaaaataattcatccgccgataaacagacgattcatttaaaaagtaagttgtctgcgtcacacaatattccaacattttcttactcgcattgattgcataaaattaaattaatcaaaaaaagaaagccgaactttcatttctgatcacataaaaaaactcaattaatttgtattagaaatatcctctttgctaaaacctgacactcaaacaactcacacttcatacgatcattttgttcaaaccaataataataaataaaattaacgaatagaggaaaagcgaggtaacatactgaattttttagttatttcttgatcagagaaaaacactcgcagctaaaaccatcgcaggaaaacaaaagtgttgtttatcatagacctgaagatattcattattgcaaaatcgttttgtctataggaaataggttgcttcttcaagccagggaagagcatttagccccataaaacattagaaaagtaaaacattgttcgagagaatagaaatagtttatacnnnnnnnnnnnnnnnnnnnnnnnnnnnnnnnnnnnnnnnnnnnnnnnnnnnnnnnnnnnnnnnnnnnnnnnnnnnnntaataaaatgactaaaataaaataaccaactgattataataatttttatcacaaaaaaacaaaacgtattaattcaaaataattaatcacacacagcaactataaccaataggtattttttggttatgattatttgatcacataaattcagctgcacaacaactatacataagaacagctaatccatatccaggattaaacatgagcatctattgtttcaagttgttccattaacctactgattttacaagaaagtcataaactccaccttgtagaaccgactgcgcttgatattgacataaagattactcacaacataaccactcattctatgagtattttttcttagaagagatcatcgtcgtagcaccaggcacggtaaccctatgcctgttttttctgcctatttcagcttcacgcattcaaccgttgacgatcactatactgacaccaatccttcacgaagattacggattgaatctgcgaccggcatgcatcccctgttgcaggttcatttgtaatgattgtggtaaggtgcgcttggcgatgttccagcgtattaaggaggctatttgcaacatgcccgaggtaatgatgttgcatggtgcctatcgaaattcgttagtctgagattgcagaattgctcccgattattcgccaggcccattataaaaaatcaaggaaaagctatgtaccttaaaaaattagtaaaccaaagcttagtagtcttcacccttattttacctgtcacaagtattgcaatagcaaagacggggacagtggtgacgaaaatgccactggatcccgcgcatgggcttttagaggcgaagagtcagtaccggattgagtatacggctgtggatggtgtacggggcaaaggagagcgtacggacagtgcggcagtgtttattccctttggcccagagccagagggcggttggccggtaatcgtttggacacatggcacagtaggaataaactcggactgcgcaccgtcactgaatacacgcacggcacgagacagccaatatcttaatacatggctttctttggggtacgcggttgtggctcctgactatcccggattaggctcagacgggatgcaccactatcttaacgcacaaggtgagggctggagcgtgcttgacggtatacgtgctgcgctcactgaatttccgcttaaaaacgaactggtactggttggccagtctcagggggcacacgccgcctttgctgcagcaggctatcagcccacctacgcaccagagctgaatatcatcgggaccgtgctaactggcaccccctatttttctgcagagagcgatgttgccagcttattcaccaaaagtgatgataaaaatcagtcatctggcgatcctaaaataccgtatattttttatatatggcaatcggctgcggatactaaccctacgctgaaggcggagaattacttccagaacgctgccttagcacagttggatgaggcaaaagccctctgtatcaccccgttaacgcaaaacgtgatgcataaccgcctgaatatgaacaatagtctgacacctaatatccagtcactgctgactaatgcgctcccttcactttcttatccgacgctgaaaatcacgcatccggtatttattggcattggtggagacgacattaatgtaccaacagctatgcaacagcagtttgccaaagacgtgcaggcggcaggtacgcatactaatattcatctctaccccggacttgaccacagcggcgcggtaaatccttctctacgcgattccgtaccgtttgtcctaggattgaaagataaaccctgatccacagggcattcctggaatatttaagctaaaggaaggggcttatcatgctacgcagtagcgtacatcgtgagcagtagatagttgaatctaccattctgcctggtcgtaaggtgtggacagtagactcaccatgaaagcgctggaaatggcatggcaaacgtgcggtaagcccgtcggggtgatgttccacagtaatcagggcagtcattatacgagcaggcagttccggcagttactgtggcgataccggatcaagcagagtatgagtcggcgcggaaactgctgggataacagtcctatggagcgcttcttcgggcgggtcaaaaatgaaatgttctacggcagaaaatgggcagacataacactggaaaaatttatctgccttctggacagttaaatacgctggtataacgataagcgaattaaggtatcagtaggtgcaatgagtccgatgaagtaccggcaacatcttgggctaaatacataaccagtccaggaaaacatccgcatccccgagacgaacatctcaatttagctactacacttaatttatttcatcttaaatatcaatgaactgcatcattaacttaagttgatgttatagcaatcgctatacaggctccttagtcatgactgacctggccacaccgcatatcgcaagaatttgctctctcagccagcggtgaccggggtcgcgttccattcttgggtgccacatctgcgataccgtaatacgacggcttttgaacggcagctcgaaaaggtgtacctggtccgttacctgctgattgagtaaatagagtgcgggtatcatggcgataagatccgattccagcgccacggaaagtgctgtcggaaatcccggtacgacgctcgcaattttacgttttgtccccagttcggccagcgcatcgtcaacggatccgtgcaacgcgccctcgggtgacgctaccacatggccccaggcgacataatcactcacgcctatttcagcctgcttagccagcgggtgccctttacggacgacgccaacaaaccgatcctcaaacagtcgttgcagccgtatttctggccccatattactctgaacgccaatctccagatcaaccagcccttcccgaagatagcgcgacgttttttccggcttaggcgcgaagcgtatacagacgtccggcgctgcgtcggcaaccgctgctataagcgcaggcccaaacgccaccacaaaaccatcgtttgccctgatggtaaaaagacgcgccagattttgcgcgctgaacgtttcagttgagggctgtaataccgccctggcatcgtgcactgcacgcctggcgcgatcccgggtcgcttcggcccacggggtcagtaccatgttacgcccggcgcgtaccaggatcgggtctcctgtgacatcgcgtaacctgcttaatgtccggctcatggccgaagtgctgaggttcagacgacgagccgcacctgcgacactcgcttcactcagcagtacgtcgagagctaccagcaaattaaaatcgggatcagacattacccttcctcccagcacattaagataaggcgtttgatgcaacaataaagtgaaaatagtgcgccttccgcctggtaaaagccatctttatagttttgtcatccatacactcttctcagaggacaaatgatgacgctcttttccagtcaacccggcgacgaaggactgcctggcccggcgcgcgcacgggtgatggccgcaataatgaccaccaccttaatgggcgtgtttgatggcaccatgatcaacattgccctgccctccatggctcaggagatgcaggtacctgccagtattgccgtctggttcgccaacgggtatctgctggcagctgcgatgacgctggcgatattcgcggcgcttgcggcccgtctgggttatcgccccgtatttctggcgggcctgacgacctttaccctgacatcactgggttgtgcgctggcgaataagcccgaagtgcttatcggtatgcgcgtgcttcaggggatcggcggcgcggcgacgctgagtattgcccccgcaatactcaggtccgtatttcccggacgcttacttggccgcattctggggttccatgccctgctcattgcctcgagctccgctatcggcccggtattgggcggtacgatccttcacacccttagctggcaatggctgtttgcgataaacgttcttcccggcaccctcgccctactgctggcggtcagagcgctgccgcgggatgcgatccgtatgcaggcgcccttcgacaccgtgggcgccatattgtcggcgctgctgttgggttcgacgatcatggcggcgaacagcctacagaacgctacttctcaattcggcagcctttgctggatggctctcgctgcgctgagcggcatggcttttatctggcaaatccgccgcacgggtcatcccttactgccgccgagtatgtttaaaaatgaacgttttaccctcgcggccttcacgtcgatggttgctttcgtcagccaggggatcacctttattgcgctacccttcctgtttcagagcgaatacggctacagtccggtagtgtctgccctgctgtttacgccgtggccattagggatcgtgctgattgcgccgcatgcaggccgttgggcggacacgatatcagccccggcgatatccaccctggggctggtggtatttgtcgtcggtttgatcctgctggcgacattacccgccagcccttcaatgtgggatatctgcctgcgaagtctggtatgcggaatagggtttggctgctttcagagtcccaataaccgggaaatgctctcaaacgttattcgtgagcacgcgagttatgcgtccggtgttttatccattatgcgcactttcgggcagtgcctgggagccgccgccgtagccgttctgctggcagcagatgaaaggtcaattcatgttgcgctgtggagcgccgccgcggcctctgcggtatcggtcgtcgtcagcgcgagccggttgcgtaaaatcactcatcctgcggaaacaggataagcgcaaaaatatcactaaacgctacgactccagcgccagcagcgcaaaacgccgatcccgcaaccaaagcggagtcttccgtcggagttcaatagactaacagaatgctataaccgctgatttatcaagggaaaattgagtttggtagacttcaggagacttgaatttggagcgggcgaagggaatcgaaccctcgtatagagcttgggaagctctcgttctaccattgaactacgcccgcgaagaggtgcgagaagcattatagcccttacgcaccctgtgacaagcctgccggatgctgactggcgataaaataaccttttagcacttaggtttacttccctgcggcggcaggtaacgcagcggatcgatggctgtcgcccggtagcggatctggaaatgcagccgcactgagtcggcatccgtactgcccatggtggcaatttgctggccggccttcacgctctggccattattcaccattagcttatcgttgtgggcataggcggtgatgtaatcctcgctgtgcttaatcatgatcaagttgccatagccgcgcagctgattgccgacgtagaccaccttgcccgccccggcggcatacaccggctggccgcgggttccggcgatatcaatacctttattgccgccatcggcggtggaataaggcaggaccactttgccgctggtcggccagcgccagcagcgctgtcccaccggcggccaggaggactgaggtaccgcggacgaaggcgtgaccgccgcggtgcgcgtagaggaagattttttcttcgttgtcttcgttgaactgctgccgttaagcttcagcttctgccccacctcaatggtgtaaggcggggagatgttattcaggcgggccagatcgcgaacgctggtgccggtggtgcgggagatgccgtacagggtatcgccgcgtttaacggtgtaggtgccaccggaatcggaggtgctggagcagccggccagcaccaggcttgcagccagcatcagtgtcatataaaagcgtttcatcatcaggcatcctgcacttaacacaaccacttacctcgcaatcagggcgaatatcataccagtccgtgcaacaatccccaatgctctacgctttttctctgatctctactccctcggcgcggtaaaaggataacccccggcgataatatccatcagcgccggcagatacggcatcgacggcaatttcaccagagccggataaaatatttgcggtgaggggaagacatcaaccacatagcaatgaggaagtttttcggcattcacttccgaagatggcagcaatgtcgccgcttccagcccgtcctccagccagtcgaggatcactccgggctgggtaatatgcataatcaccttcgcgctaacgccggatttacggaacaggtccattaacatttcataggtgccggaatctttcgcccggtgcagcagcaccagcggcatctccgccagagcattgtagtcataggggttggaaggcggttgcgacaggcattttttattaatgaccgctaccagtttaatggggtcgaaggagatataatcgaagccttctccgcggtagggtcgctgtattaatgccagatcgatagcgccttcatttaataatgtttccagatgacttgagtcagtcaccgagatatttatcgcggtttcaggattgcgccgatagagctccattaataaaggctgaaaataattctggtacagatgagttaagccaatacgtacttccacgcgggtcttttgcgcaatatcggccgtctcccgagcggtatcctccacctggcgtaaaatttcacagcctttccgatataagaaataccccgcttccgtcggttcaatgcggttgccgcggcgctcgaaaagtgaaacctgcagctcttcttcaagctcctgaatccgcttgctgagcggtggttgcgccatattgagcgacttcgctgcctgactcaccgaaccgtgttccactacccggcaaaaatagcgtaagcgtttaagatccatgaccggcctcattaattatcttccgggcagtatcacactaacgctgagaaataaaaagccgcgtcgaattcaccatattgattaattgtttattaacatttttttaaaaccaacttttttgatctactgaccatccggtaaacggtatttgtttaatttatcgaagaaaaatattgtgcgcttagcaaaattgctttttaaaggaacactcatggcaaattcagataaaaaaacgccgtcaccggtgcatgatttacgttcggctctggcactgttaaaaacgctgccgggcgaatatgttgagaccgataccgaagtcgatcctcacgccgagctctcaggcgtataccgctacgtgggcgccggcggcacctgccagcgcccaacgcgcaagaacggcccggtcatggtctttaacaaaattaaggggttcgacgatatcagcgtggccatcggtctgaacggctcgcgccagcgcgttagccagttcctgcagtgtgaaccggcaaaactgggtcatttgctgaaagattccgttgaaaatgctattagcccaaccatggtacagggcacggcggtatgccaggaagtggttcacctcgccagcgatgctgattttgatctgcgtaaactgctgcctgcgccaactaacaccgaagaagatgccggtccgtatatcactatgggcctgtgctacgcctccgacccgcaaacccatgaatccgatatcactattcatcgcctgtgtgtccagagccgcgatgagctatcaatgtggctgacgccgggtcgtcatatcgatgccttccgcatgaaggcggaagcggcgggccagccgctgcctatttcgatcagtatcggcgtcgatccggctatcgaaatcgccgcctgctttgagccaccgaccaccccgctgggtttcaacgagctaagcattgccggcgcgctgcgtggccgcgcggtggagatggtgcaatgtaagactattaatgaaaaagccattgcccacgccgaaatcgttatcgaaggcgaactggtgccgaacgtgcgcgtacgcgaagatcagaacacccataccggccgcgcaatgccggagttcccgggctataccggtgaagcgaaagaggcgattccggttattaaagtcaaagccgtcacccatcgtactcagcctatctggcgcaccaccgtcggaccaggcgaagaacatgtcaacatggccgggatcccgaccgaagcgagtattctcgatatggtggagcgcgccatgccgggcaaattactcaacgtcttcgcccactcggcaggcggcggcaaactactggcggtactgcaatttaagaaatcttcccctgccgatgaaggccgccagcgccaggcggcgctcctggcgttctccgctttcccggagctgaagcacgtcattttggtggatgaggatgttgatattttcgatagcgacgatgtgctgtgggcgatgcaaacccgctaccagggtgatgtcgataccgtaatgatcccgggtgtgcgctgtcatccgctcgacccgtcgcaggtgccagagtacagcccgagcgtgctgcagcagggaatgtcgtgcaaaaccattttcgactgcaccgtaccgttccatctgaaacacaactttgagcgctctaagttcaaagcggttgatgtaaaacgtttcctgccggacttcgaataagggcgaataccatgacaccacgcatcatcattgggattagcggcgcttccgggttccagtacggcgtgaaagcgctggaacttttgcggccactggcgatagaggttcatctggtggtctccaaaggtgcggaaaaaacctgcgagctggaaacggattaccgcttagatgaagtgatggcgctggctgacgtggtacatcccatcaaccatctgggcgcgtccatctccagcggctcgtttaaaacgctggggatgttggttgccccctgctcgatgcgatcattgggcgctatcgcccactgtctcaccgataatctgcttacccgcgcggcggacgtagtgctaaaggaacgccgtcggctggtactgctggcgcgcgagacgccgcttaatctcggccatatacgtaatatggcggcagttaccgagatgggcggcatcatctttccgccggtgcctgcactctatcagcgtccgcaaagcgcagatgacattattacccatagcgtaaaccgcgcgcttgacctgtttgacctggaggtcaataacatcccgcgctggggtgagggcgagctgctttacacgtaacaggaactcgcaatgttaattggtccgtatgtaaatggttccgccgtgattatcggcggattgatcggcgcaatggccggaggaaaacttccggaacgcgtcaaaacagccctgccgatgacctttggtctctgctccgtcggcctgggtatcaccctggtactgaaggtgaaatatatgccggcggtagtgctggcgatggtactcggcgccttcctcggcgaactgctgcatctggaaaaacgcatcggcagcgcggcgggatcaacgcgcgggttgattaataaagttcttccacccgttcagggattaggtcatgaagagttcaccgaaaaattcgtggctattttggtcctgttttgcgccagcggtaccggtatttttggtgccatgaccgaaggtatgagcggcgatccatcaatcctgtacattaaaaccatcctcgatctttttaccgccgggatcttcgcgacgctgctgggctacgcggtgatgaccatcgctatcccgcagatcgtgattcaggtggcgctggcgatgctagcggtgtttattctgccgatgatcacgccgtcaatgatggcggatttctcctgcgccggtggattgctgatggtggccactggattacgcatctgcaacattaagcttttcccggtcgccaacatgctgccagggcttgttttggtaatgcctttctcccatttatgggctaccctagtggcctgagtacatgacccggcgggtttgtgccgggtcattttttattttcaggagtcgtcatggccggggaacacgtcattttgctggatgagcaggatcagcctgccggtatgctggagaagtatgccgcccatacgtttgatacccctttacatctcgcgttttcctgctggctgtttaaccagcagggtcagttactggtcactcgccgttcgttgggcaaaaaagcctggcccggggtatggaccaactcggtctgcggacacccccagcagggcgagaccttcgagcaggccgtcacgcgccgctgtcgcttcgaactcggtgtggagatctctgatatcgcgccggttcacccggccttccgctaccgggcggtcgccccaaacggtatcgttgagaacgaagtgtgcccggtatatgccgcgcgcgtggtaagcgaagtgcagcctaacgacgatgaagtcatggactatcagtgggttgacctggcaaccatgttaagcgcgctggccgccacgccgtgggcgttcagcccgtggatggtgctggaagcggaaaatcgggacgcccgccaggcgctgaccgactttgttgcgcgtctgcgcgggtaagctgactattctccaggccaggcgcagccctgtgcctgtcattaatgcctggcggcgctacgcttgcacaggcctacggttctgcgccattgcgtagcccggataaggcgtttacgccgccatccgggatccccggcttgcgctgcgctgagccaggctacgccagccttaggacctcacatcagacataaaaaaacccggcaagccgggttttttgctcttcgcgaagggcgattatttctgcggacgcatcgccgggaacagaataacgtcgcggatggtgtggctgttggtgaacagcatgaccatacggtcgataccgatacccagaccagcggtcggcggcaggccgtgttccagcgcggtgacatagtcttcgtcatagaacattgcttcgtcgtcgcctgcggctttcgcatcaacctgatcctggaagcgctgcgcctggtcttcggcgtcgttcagctcgctaaagccgttaccgatctcacggccgccaatgaagaattcaaagcggtcggtgatttccgggttgacgtcgttacggcgcgccagcggagaaacttccgccgggtattcggtgatgaaggtcggctggatcaggtgcgcttccgccacttcttcgaagatctcggtcacgatacggcccagaccccagctcttctccactttgatgccgatagattcagcgatcgctttcgcggaatcaaagttatccagatccgccatctcggtttccggacggtatttcttgatcgcttcgcgcatggtcagtttttcaaacggcttgccgaagtcgaacacctggtcgccgtaaggcacttcggtattgccgaggatgtcctgcgccagggtgcggaacagagattcggtcagctcgatcagatctttataatccgcataagccatgtagagttccatcatggtgaactctgggttatgacgaacggagatcccttcgttacggaagttacggttgatctcgaagacgcgttcgaagccgccaaccaccagacgcttgaggtacagttccggcgcgatacgcaggtacatgtccagatccagcgcgttatgatgggtgatgaacggacgcgcggaagcgccgcccgggatcacctgcatcatcggggtttctacttccataaagccgcggccaaccatgaactgacggatgcctgccaggatctgcgaacgcactttgaaggtcttacgagattcatcgttggagatcaggtccaggtaacgctgacggtaacgcgcttcctgatcctgcaggccgtggaatttgtccggcagcgggcgcagagctttagtcaacagacgcagctcggtgcagtggatagagagctcaccggttttggtcttgaacaacttaccgcgggcggcgatgatgtcgccgaggtcccactttttgaactggtcgttataaacgccttccgccaggtcatcacgcgccacgtacagctggatgcggccgcctacgtcctgcagggtcacgaaggacgctttacccatgatacgacgggtcatcatgcggccagcaacggccacttcaacgttcagcgcttccagctcttcgttttctttgccatcgaagtcagcgtgcagttggtcagaggtatggtcacgacggaaatcgttcgggaaagcgacgccctgctcacgcagcgcagccagcttctcgcgacgggttttcagttcattattaaggtcaattgccgcgtcagcgccctgtgcttgttgttcagacatgttggttcctcataaccctgctttcaaacttgcttcgataaattggtccaggctgccgtcgagcaccgcctgagtgttgcgggtttccaccccggtacgcagatctttaatacgcgagtcatccagcacgtaagagcggatctggctgccccagccgatatcggacttgttgtcttccatcgcctgcttctcggcatttttcttctgcatctccagttcataaagctttgctttcatctgcttcatggcctggtctttgttcttgtgctgcgaacggtcgttctggcactgcgtcaccaatccggtcgggatatgggtaatacgcaccgcggattccgtacggttaacgtgctgaccaccggcgccggaggcgcggtatacgtcaatgcgcaggtcggccgggttaatttcgatatcgatatcgtcttccacttccgggtaaacgaacgcggagctgaaggaggtatgacggcggccgccggaatcgaacgggctcttacgcaccagacgatgaacgccggtttccgtacgcagccagccgtaggcgtaatcgccaatgatcttaatggtcacggatttaatccccgcgacttcaccttcggattcttcgatgatttcggtcttaaagccgcgcgcttccgcccagcgcaggtacatgcgcatcagcatgctggcccagtcctgggcttcggtgccgccggaaccggcctgaatgtcaaggtagcaatcggcgctgtcgtattcgccggagaacatgcggcggaactcaagctgcgccagcttctcttccagggtatccagctcggcgacggcttcgttaaaggtctcttcgtcgtccgcttccacggccagatccagcaggccggcaacgtcttccagcccctgggacatctgatccagggtatctacgatggcttccagggaagaacgctctttacccagcgcctgggcgcgttcgggttcgttccacacgtccggctgttccagctcggcgtttacttcttcgagacgctctttcttggcatcgtagtcaaagataccccctaagaacgtcggagcgctccgtgaggtcctgaatgcggttttttaccggatttatttcaaacatggtcggtttcttttaatggatttgtcaaaatgcggtgataagagcggaattctaccggattcgcgcccttattcctacactgttgtcaatttggccagaggtgatcgatgatcagctgcaggctacggttgccgcggaactcgttgatgtcgagcttgtaggctaactggacttcacgcacgccgttatccggccagatggaagtatcaacgttgaaggcgataccgtccagcagcggcccgccgtcaaccggttcgaccatcaccttcaggtgacgctcgcccaccagccgctgctgcagcaggcgaaaacgaccgtcaaacagcggttccgggaacatctgcccccacggcccggcgtcgcgcagcatctgcgccacttccatgctcatctccgccgccgccagcgggccatcggaaaccacctcgccctgcaacagcgcaggatccagccattcggtcaccagctcgccgaagcgctgttgaaactcttcaaaacgcgcctcctccagcgataagcccgccgccatcgcgtggccgccgaacttcaggattagcccgggataaagcgtatcaaggcgctccagcgcatcgcgcatatgcaacccctgaatggaacgaccggagcctttcagcgtgccgtcgccggtaggcgcaaaagcgataaccgggcgatggaagcgctccttaatccgcgaggcgagaatgccgactaccccttgatgccattgcggatggtacatcgccagcccgccgggcagggtatcggcgctgcgctccagctgctgacagagcgttagcgcttccgcctgcatcccctgctcaatctctttgcgcgtctgattaagcgcatcgagctcgttggccagcacccgcgcttcgccgatgttgtcgcacagcagcagcgcgacgccgaccgacatgtcgtccagccgtcccgccgcgttcaggcgcggcccgagggcgaaaccgaggtcgctggccgccagcttttgcggatcgcggttggcaatttccagcagcgccttaataccgggccgacatttgccggcgcgaatgcggcttaacccctgccaggtgaggatacggttgttagcatccagcggcacgacgtccgcgacggtgccaagcgccaccagatccagcagctcggcaaggttcggcgcggggatgccgcgagcgtcgaaccagcctttatcgcgcagaaaagtgcgcagcgccagcatcagataaaacgccacccccaccccggccagtgattttgacgggaagtcgcaatcgcgcaggttgggattaacgatagcttccgccgccggcagcgtctcgcccggcagatggtgatcggtcaccagcaccgggatccccagcgcatgggcatgatcgacgccggcatgggacgagatcccgttgtcgacggtcatgatcatctgcgcgccgcgagcatgggcctgatcgaccacttccgggcttaaaccgtagccgtcttcaaagcggttcggcaccagataggagacgttgccgtaacccagcgcgcgcagggccaacacgctgagcgcggtgctggtggcgccgtcggcgtcaaaatcaccgaccaccacgatgtgcaaccctttctggaacgcgtcatgtagcatctcgaccgctttttcaacgccggtgagctgcgtccaggggagcatgcctttgacgctgcgctccagctcctgcgcgctgcgcaccccgcggctggcatatagccgctgcagcagcggcggcaggtcggcggggagttcgacgccgtcaaccgcctcgcggcggcgtagttgtatctgttgtttcacgcgaatcagttaccgcttgtctgttttttgtgctcatcgaggaacgccttcagctctttcggcccctgatagcccggcagcaccatgccgttactgaggaccatcgccggcgtaccgttgacgcccatctgcacgccgagggtgtaatgtttggcgatatctacgctgcagctcgccggctgcacgcctttaccattcatggcgtcatccagcgctttgttgcgatctttcgcgcaccagatggccttcatgtcctgctccgcctggctttgcagaccctggcgcgggaaggccagataacgcacggtgatccccagcgcgttgtagtcgctcatctgctcgtgcagtttatgacagtagccgcaggtaatatcggtgaagacggtgatgacgtgctgctccttcggcgctttgtagacaatcatctcattgctcagcgcgttcagcttacccagcagcagctggttggtgacattgaccggctgcgcgccgctcacgtcgtacatcggcccctggataatatgtttgccgtcgtcggtcacgtacagcacgccgctgtcggtcagcaccgtgctcatcccggaaaccggcgatggttgaatatcggtgctctgcacacccagcttcgccagcgactgtttaattgccgcgctatcggcgtgcgccgctcctgaaagggaggccgccagcagggtgaacatcaataaaccttttttcatactcagtccttttgttcagcactcacgcccgcgggtggtgctgttgatgaagttgtcgcagacgctcggtcgccacgtgggtgtatatctgcgtggtggagagatcgctgtgtcctaacagcatctgcaccacgcgcagatcggcgccatgattgagcaaatgcgtggcgaacgcatggcgtaacacgtgcggggaaagcttttcgctgtcgatccccgccagtacggcatagtgtttaatccgatgccagaaggtctggcgcgtcatctgctgggcgcgctggctgggaaataagacatccgacgccacgccgttcagcagccaggggcgaccatactcgaggtaattttccacccacagtaccgcctcttcccccagcggcaccagccgctctttgttgccttttcccaccacccgcagcacgccctgccgcaggctgatgtcgctcatcgtcagccccaccagctccgagacgcgcaggccggtggcatacagcacctccagcatcgctttatcgcgcaattccagcggctgctccaccagcggcgcctgcagcaggcgctcaacctgcgcctcactgagatcttttggcagccgctgcggtagcttcggcgaggccagcagcgcgctgggatcgtccgggcgaattttttcccggtacagatgctggaaaaaacggcgcacggcgctcagcaggcgcgcggtgctggtggctttgtagccgccggactgccgctcagccagcagcgcctgcagatcgtcgctgccaacgcttgccagcgacaggccgcgatggtgcaaccactcaactaacatcgtcaaatcgcgacggtaggcgctgagcgtattctccgccaggttgcgctccagccaaagggcatcgagaaactgttcgattagtgccagatcctgtttcacatcggcctcattgttcgttaaacgctctcattatgccttaagaggacgcctttctggtacactgcccgccattcacggcaagaatcgagatgtttacgcgatgaatataggtctgttttacggctccagtacctgctacaccgaaatggccgcggagaaaatccgcgatatcatcggccccgagctggtgacgctgcacaatctgaaagatgactcccccgcgctgatgagccagtacgacgtactgatccttggcatcccgacctgggatttcggcgaaattcaggaagactgggaagcggtctgggatcagctggacaccctgaacctcgagggaaagatcgtcgcgctgtacggcatgggcgatcagctgggctacggcgaatggttccttgacgcgctcggcatgctgcatgacaagctggcgaccaagggcgtgaagtttgtcggctactggccaaccgaaggctatgagttcaccagcccgaaaccagtgatcgccgatggccaactgttcgttggcctggcgctggatgaaaccaaccagtacgacctgagcgacgagcgcatccagagctggtgcgagcagatcctcggcgaaatggccgaacacttttcctgacgcggcttactcctgcgccggtttttgcagcaccagccggcgcagatcgcgccactctccggcgtccatgctgtccgccgccagccaaagatgctgtccgcgccgggtatcgacatggcgcaaacgcagcagcataccgctattgataacccacggcgtcccgaggatttcccattcggcgttttgccagcgaagacgggaatcggtgagcagttttatctccccgcgacgggcatggatccgccgctggctgcgcacgcagtcgaagaccaccagcgacagcagcagcagccagatcggggtatagctcagcggccagggaaccaacagcaccagggccgccaccacgccgtgaagcagcagggaaaaccactgcgcgcgccaggagatacggagatcagattgccacaggaccacgttcccgattccgtgtctgaattaaggttaccatccgctgcagctccgcatcggccggtttgccgtggttcatcagccagttgaacagatccggatcgtcattttccagcaggcgaatgaacagctgtttgtcagcgtcgctgagggtatcgtactcatactcaaagaacggcatgatggagatgtcgagttcgcgcatcccgcggcggcatgcccagtggatacgtgctttattgttaatgtccatgttgaccttccagcagcaaaatataggttagtttaacccgttttctgccgtaactttacaggaatatcgctgaatgcgagcatccttccataaaaaccttaaaataatgatgggtttattgattccctgcgtcaggcggctgtctcacgccagcgcacaaatggcctgttgaaagcacttgcaatgcactatagctcttttaccattggtcacacacactgcgttaagcgattcaggatatgactatggcttttacaccttttcctccgcgtcagccttcctcttccgctcgtctgccgttaacgctgatgaccctggatgactgggcgctggcgacaattagcgggccggacagcgaaaaatatctgcaggggcagattaccgccgatgtgagtcatctcaccgatgcccagcatctgcttgccgcccactgtgatgccaaaggcaagatgtggagcaacctgcgcgtattccgtcgcgagggcggcttcgcgtggattgagcgccgcagcctgcgcgacgcgcagctgaccgagctgaaaaaatatgccgtcttctccaaagtcaccatcgccgccaacgacgatctggttctgctgggggtggccggcttccaggcgcgcgccgcgctggcgccgctgttcgccgccttgcccgacgctgccaccccggtggtcagcgaaggcgctaccagcctgctgtggtttgaacacccgggcgagcgcttcctgctggtgaccgatgtcgacaccgccaaccgcgtcaccgacgcgttgcgcggcgaagcgcagtttaacaacagccaacagtggctggcgctgaatattgaagccggtctgccggttatcgacagcgccaacagcgggcagttcattccgcaggccaccaacctgcaggcgctgggcggcatcagcttcaaaaaaggctgctacaccggccaggaaatggtcgcgagggcgaaattccgcggcgccaataagcgcgcgctgtggacgctgtcagggaccgccagccgggtgccggaagccggggaagacctggagctgaagatgggcgacaactggcgccgcaccggtacggtgctggcagccgtacagctggatgacggaagcctgatggtccaggtagtgatgaataacgacatggaaccggacagcgtgttccgtgtacgcgacgatgctggcagcctgagcatcaaaccattgccgtattcgctggaagaaaattaaggaaaagttcccggcttgcggcgcttgcgccttagccgggctacccggccgcagtattttgtagccacggtaagcgcagcgccaccgtgggatgtttatcaggactggccgatgtaaagataaatcgccaggaagtgacacacgctgccgccgagcacgaagccgtgccagatagcgtggttataaggaatacgtttgcagacgtagaagatgacccccagcgagtacaccaccccgccaaccgccagcagcgttaccccgcccaccgccagcttcactgccagctgatagaccacgataagcgacagccaccccatggtcagataggtcaccagcgacaaaattttaaagcggtgcgcgatggtcagcttaaacaggatccccagcagcgccaggctccagatgacgatcatcagccccttcgccagcggtgaattcaaccccaccagcaaaaacggcgtgtaggtcccggcaatcaacaggtagatagcgcagtggtcgaatttcttcagccactgtttcgcccgctgatgcgggatcgcgtgatagagcgtggaagcgaggaacagcataatcatgctgccgccgtacaggctgtagctggcgatcgccgtcgcgctggcgtttgtatccgccgcctgcaccagcagcaacacaaggccaacgataccgaacaccagcccgatcccgtggctgatgctgttggcaacttcctctgccagagaatatccctgagtgattaatggtttgcgaaccatactggactccgtgaaaacaagaacgctttcattgcccacttagggtaactgagaatgattccagtgaacacctgttagctaaaataaaacgatgtatatttgtaaatactttaaaatcataaagttacatttttatttcaactcacagctgttcctgattatcttaaagcgttttgaattcaatgacataaaactggctctcgccaggatagatgtcgctgatgacctgccgcagctgcccgagagtcatattctcctgttgcgcatgctgttcggtcagcgtatcgagcgtcaccgtcgaggtcgcggtcacggcaatggtgcaaaaatagccgtcatcttcatagcgcccaacgcgcagcacatcgccgggcttaaagtgcgactccgctgcatcgcgaatggtgatggttttgcgcccggcgaggatgtcgtcctgaaaacgctgaaaaaaggtaatgtcattggcctgcatgatataattccgtcctggtcattatgaattgtgagttcgccctgtgagtatgttctcccacgccgctgtcgccagtctcaataatcttgagatgatggtctaccactacgtcattaaaaatcgtgacaaagtgatgtacatgaccatccgcgaactggccgaggccgccggggtctccacgaccaccgtgttacgcttctgccgcaaactgcagtgcgagggctactctgaatttcgcgtgcgctttaaattatatctcgagcagaatgagcctcaacaggcaaatatcggcgccagcgaaataatgagcttttttaaaagcgtcaataatgacgagtttgatgaattactcgagcaggccgtcgatattattctcgcctccgaacgtattatttttgtcggcgccggcacctccggcgcgctggcgaaatatggcgcacgcttcttctccaacgtcggtaaattcagcaaccatattgacgacccctattttcctgtaaccaacgatatggcccgcaacgcgctggcgatcgtgctttccgtctctggcgagacggaagagatcctgcgctttgccagccagttcagcctgcatcattgcaaggtgatgtcgattaccagccatgagcattcgcggctggccaaactggctgatttcaatctctcctggcacgtgccgcagacgcgcattggcggcgtctacgatattacaacgcaaattccagtgatctatattctcgaatccctcggacgtaaattagcgcgcaaaatcagctaaaaataacagcctgtttttttgatgtaacatattacctttggcggaatttgttatatcgtgacattcactttcactttgctagactccagaacaatagttattagagagattagccaggatgaaaaaattaacccttccgaaagattttttatggggcggcgcggtcgccgcgcatcaggttgaaggcggctgggatcagggcggcaaaggccccagcatctgcgatgtgttgaccggcggggcgcacggcgtgccgcgcgaaatcacccaccaggtcgaagcgggaaaatactacccgaaccacgaagccgtcgacttctacggtcgatacaaagaagacatcaaactgttcgccgagatgggcttcaagtgcttccgcacctctatcgcctggacccgcatcttcccgcagggtgacgaaacccagccgaatgaagagggactgaagttctacgacgacatgttcgacgagctgctgaaatacaacatcgagccggtgatcaccctctcccacttcgagatgcccctgcacctggtgcagcagtacggcggctggaccaaccgcaaagtggtcgatttctttgtacgcttcgccgaagtggtcttcgagcgctataagcacaaagtgaaatactggatgacctttaacgagatcaacaaccagcgcaactggcgcgcgccgctgttcggctactgctgctccggggtggtctataccgagcatgacaatccggaagagaccatgtaccaggtgctgcaccaccagttcgtggccagcgcgctggcggtgaaagcggcgcggcgcatcaacccggacatgcaggtcggctgcatgctggcgatggtcgccctctacccttactcctgcaaaccggaagatgtcatgttcgcccaggagtcgatgcgcgagcgctacgtctttaccgacgtccagctgcgcggttactacccgagctatgtgttgaatgaatgggaacgccgcggcttcaacatcaggatggaagacggcgacgcgcagatcctgcgcgaaggtacctgcgcctatctcggcttcagctactacatgaccaacgcggtgaaagccgagggcggcactggcgacgccatttccggtttcgaaggcagcgtgccgaacccgcacgtcaaagcttccgactggggctggcagattgacccggtcggcctgcgctattctctgtgtgaactgtatgagcgttatcagaagccgctgtttatcgtggaaaacggctttggcgcctacgacaaagtagaatccgacggcagcatcaacgatgactaccgcatcgactacctgcgcgcccacatcgaagagatgatcaaagcggtcacttatgacggcgtcgatctgctgggctataccccatggggctgcatcgactgcgtctccttcaccaccgggcagtacagcaaacgctacggcttcatctacgtcaacaaacacgacgatggcaccggcgacatgtcccgctcgcgcaagaagagctttaactggtacaaagaggtcatcgccagcaacggtgagaacctgtaactaaccgccctctcccggccgggggagggctaattgcttatccgccagacacttctttacagctttaccattgccaaaacccgttcgcccgttaagataagcctcgtgaatatttgaggcaatcatgattaagcgacaacgcaaagccattctttttgtcctcctggcctgtctggtggtgctaacctgcaccgctcaacggatggccgggatgcacgcgctggtcatgaacctcaccgccgacagcccgtcgctacagaaaaaccaggatcaggccgaggcgccggtcacgccgtgcgagctcagcgccaagtcgctgatggccgttccgccgatgctgtttgaaggggcactgttggctatcaccctgctgctggcggtgctggcggcgatcccgccgcgtatcgaacgccagtggcctccccgcgttatctcctcaccccgattgcgggtgcatctgcgattatgcgtcttccgtgagtgattgattctcctgacagttcaggttaattcatcacttacggagcaaacttatgtatatggtattcaggcgactactggtctgcctgctttggctatggctgcccgtcagccaggccgccgacagcggctggctgcgcgccgccgacaatcaacacgccagcgtgcgcctgcgggcgcaaaccgagagcaatggcgacactcgcctgcttttagacgtagcgctggaaaagggctggaaaacctactggcgctcgccaggggaaggcggcatcgcgccggctatcgcctggcacacgccgctggaggtgaactggcgctggccgacgccgcagcgcttcgacgtcgcgggcatttccactcagggctatcacggcgacgtcagctttccgatgacgctgcgcgggaagataccaccgacgcttagcggcgtcctgacgctctctacctgcagcaatgtctgtattctcactgactatcccttttcgctggatatgacgactccggcgggggagcgatttaattatgattttacccgcgcgatgggcacactgccgctgcgcgatggcctgacttcgcaactgaccgccagctacgtcagcggcaaactgacggtgaccgcccgccgcgatgccggctggcagcagccagcgctgtttatcgacagcatggaggatgtcgatttcggtaagccgagctttaccagccgcggcgatacgttgaccaccaccgtaccggtcaccgatagctggggcgaagcggcgccggacctgagcggcaaaacgctgtcgctggtgctggcggatagcggtcaggcgcaggaaagccatatcgccatcgccgccggcagcgccgcgccggggctggcgttaggctgggtgctgctgatggcgctggccggcgggctaatcctcaacgtcatgccgtgcgtgctgccggtgctggcgatgaaactcggctcgctggtgcaaaccgaacgtcgcgaacgcggcgcggtgcggcggcagttcctcgcctcggtgtgcgggatcgtcgtctcgttcctggcgctggcgctgatgatgaccgcgctacgcctggggaatcaggcgctcggctggggcatccagttccagaacccgtggtttatcggcgcgatggcgctggtgatggtgctgttcagcgccagtttattggggctgttcgaaatccgcctctcctccagcgccagcactttcctcgccacccgcggcggcaacggcttaatgggccatttctggcagggcgccttcgccaccctgctggcgacgccctgtaccgcgccgttcctcggtaccgccgtgtcggtggcgctggtggcgcccctgccgctgctgtggggcattttcttcgccatggggatcggcatgagcctgccgtggctgctgatcgttgcctggccgggtctggcgcaacgtctaccgcgcccgggccgctggatgaatcatctgcgggtggtgctggggctaatgatgcttggttcagcgctatggctggtcagcctgctgacgatccacatcggccgtacgccggtgcttaccctgctggtgattctggccatcgccctgctagtggccaccgcctggcgctaccgctggcggacggcgctgcgcgcgggcgccctggccatcgtggtggcgggcgccgtcgcctttgtcgcccaacaggacggccagggcccgcgccgcgaccgggttaactggcagccgctcagcgagcaggctatcgccagcgccctggcggagcataagcgggtatttattgatgtcaccgccgactggtgcgtgacctgtaaagccaataaatacaacgtgctgctgcgcgacgacgtccagcaggcgctgttagcgccagacgtagtcgccctgcgcggcgactggagccgcccctccgctgacattagccagtttttaaccgcacgcggcagcgccgcggtgccgtttaaccagatttacggaccggaattgccgcagggacagattctgcctgcgctgttagaccgcgaacaacttatcgctaccctgtccgccgctaaaggaaaataacatgagagctatcaccgccttattactgctgtgcgtatcggccttcagcttcgccgccccggcggaagaaccacaatcgaacggtaatgaccagttagcccagctgctgtttaacgatccgaatagcccgcgcaccggcgcgaaagagccaaaactcacaatcgtctcgtttaccgattacaactgcccttactgcaaacagtttgatccgctgctggaaaaaatcgtccacgataatccggacatccagctcatcgttaagctgctgccgtttaaagggcagagttcggtgaatgccgctaaaatcgcgctctccacctggcgtcagcagcccgataaattctgggcgctgcatcagcggctgatggcgaaaaaaggctatcacgatgacgccagtatcgccgccgcgcagaagaaaaccgctaccgatagcgtaaatatcgatgacaagaccatggattcgctgaagatgaacctgattttgtcgcaggtgctgaatattcagggcaccccggcgaccatcatcggcgatcagatggtggccggcgcgatccctgctgatgagctggaggggctggtgaaagaacagctggcgaaagcccgtggccagtaaaatcaggcgctggctgcgcgagctggcggtgtggctgctgattggcgcggcggtgagcctggcggtggattattttcgccagcccgcgctgccgcaaaacgtcagcgccacatcgctgcagacactcgacggcaggacgctggatctgaacgccataagccagcaaaagccgctgctgctgtacgtctgggcgacctggtgcggagtttgtcgctataccacgccgtcggtggcatcgcttgccgccgacggcggcaatgtgctgacggtagccctgcgttccggcgataacgtcacgctggagaagtggctgaccaggaagaaaatgacgctgccgacggtgaatgatccaagcggccagctggcgcggcaatgggatatccaggtaacgccaacgctggtggtcatttctcaaggcgaggtaaagtcggttaccaccggctggaccagcagttggggaatgcgcctgcggctgtggctggcctcctggtaggccgtcgggctttagcggtttttatgccgggtaaggcgtatccgccacccggcctaccattcggctttgaccccgtagggccggcaagcgcagcgccgccgggcaatagacatctacgggttatttcccgcccgccagttcaaggaagctacccgtcacatacgacgctttgtcgctcagcagccaggcaatggcctgagcgacctcttccggctggccgccgcgctgcatcggtagcgaacctttcactcgatccacgcgtcccggctcaccgccggaggcgtgcatctcggtataaatcagccccggacgcacgccgttgacccggatcccctgcgccgccacctccagcgccagcccggtggtcagggtatctaccgcccctttcgacgcggcatagtcaacgtactcccccggcgcgccaaggcgcgacgccgccgacgacacgttaactatcgccccgcccttgccgccatgccgatgtgacatgcgctttaccgcctcgcgacagcaaagaaagtatccggtgacgttggtggccagtacgcggttaatacgctcggcgctcaggctctctaccgtacattgggtaaacaggatcccggcattgttgaccaacgccgccagcggttcgcccatgcggtcaaccgcctcaaacatcgccatcacctgcgcttcatcgctgatatccgcccgcagcgccgtggctttgccgccagacgccacaatggtattcaccacctcggtggcggcgttaatgttgtgatggtaattgaccgccacggtatatccttccagcgccaacagcagcgccgtcgcccggcctatgccgcggctcgcgccgctaataagagctattcccataccttccctccaaaaaaataaaggcgccgcagcgcctttaaaagtttagctaaaacgcaaacttactggtattcgctcatcggcacgcaggagcagaacaggttgcggtcgccgtagacatcatccagacgcttcaccgtcggccagtacttgttgtgcaaccctgccgggaataccgccagctcgcggctgtacggatggttccactcgcccaccagctcgccctgggtgtgcggcgcgttcaccagagggttatcctccaacggccattcgccggctttgacgcggtcgatttccgcgcggatcgccagcatcgcgtcgataaagcggtccagctcgaccttgctttccgattccgtcggctcaaccatcagcgtccccgctaccgggaaagacatggtcggggcatggaagccaaagtcgatcaggcgcttggcgatatccagctcgctaatgccggtctcttctttcagcggacgaatatcgagaatacattcgtgcgctacgcgaccatcgcgaccggtgtagagcaccgggtaggcgtctttcagccgggtagcgatgtagttggcgttaaggatcgcgttctggctcgcctgcttcagcccttccgcgcccatcatgcggatatacatccagctgatcggcaaaatggacgcgctgccgaacggcgcggcggaaaccgcgccctggcgggtcagcatcccttcaatctgtaccacgctgtggcccggcacgaacggcgccaggtgcgctttcacgccgattgggcccatgcccggaccgccgccgccgtgcggaatgcagaacgttttatgcaggttgaggtgcgaaacgtcggcgccgataaagcccggagaggtgatcccgacctgggcgttcatgttggcgccgtcgagataaacctggccgccaaactggtgcacgatctcgcacacttcgcgaatggtctcttcatacacgccgtgggtcgacggataggtgaccatgatgcaggagagattggcccccgcctgctctgctttttcacgcagatcggcgagatcgatgttgccgtttttatcacaggcaacgaccactacctgcatacccgccatctgcgcggaagccgggttggtgccgtgcgcggagctagggatcaggcagatatcgcgatggccttcgttgcggctctcgtgatagtggcgaatcgccagcaggccagcatactcgccctgcgcgccggagttcggctgcatacagacggcgtcatagccggtcagtttcaccagccagtcggaaagctgggcgatcatctgctgatacccttccgcctgctcgaccgggcagaacgggtgcagctcggcaaattccggccaggtgatcgggatcatctccgccgcggcgttcagtttcatggtgcaggagcccagcgggatcatcgcctggttcagcgccagatctttacgctccagggcgtgcatgtagcgcatcatctcggtttcgctatggtagcggttaaacaccggatgggtgaggatcgcatcgtcgcgcagcatcgccgccgggatcgaacggctatccagcgccacgtctttatccagggtatcgatatccagaccgtgatcgtcgccgacgatagcgcggaacaggttcagcacatcttcgcgggtggtcgcttcatcgagcgtaatgcccaccgcgccgtgaatatcgctgcgcaggttaatcagcagggcttcggcacgcgccagcaccgcggctttatccgccacttcgacgcacagggtgtcgaagtagtgggcatggcgcagcttcagccctttcttctgcaggccgtcggccagaatgtcggtcagacgatgaatgcggccagcgatacgtttcagacccgccgggccgtggaataccgcgtacaggctggcgatgttggccagcagaacctgcgaggtacaaatgttggagttcgctttctcacggcggatgtgctgctcgcgagtctgcatagccatgcgcagcgcggtattccccgccgcatctttcgatacgccgataatccggcccggcatggagcgtttgaattcatctttcgccgcgaagaaggccgcgtgcgggccgccgtagcccatcggcacgccgaagcgttgggcggaaccgaaaacgatatccgcgccctgcttgcccggcgccgtcagcagcaccagcgccataaagtcggcggcgacgctgacaatcactttgcgcgctttcagctcggcgatcagtttactgtaatcgtggatttcgccggtggtgcccacctgctgcagcagcacgccgaagacatcctggtgatcgagcactttgtcggcgtcatcgacgatgacgtcgaagccgaaggtttccgcgcgggtgcgcaccacgtccagggtttgcggatggacgtcggcggcaacgaagaagcggttggcgctcttcagtttactgacgcgtttggccatcgccatcgcttcggcggcggcggtggcttcatcaagcagcgaagcggaagcgatatccaacccggtcagatccagagtgacctgctggaagttgagcagcgactccagacggccctgggatacttccggctggtaaggggtataggcggtataccagcccgggttttccagcatgttgcgctgaatgaccggcggcagctgcacggcggtatagcccatgccgatgtaagacttgaagcgcttgttgcgactggcaatcgccttcagctccgccagcgcggcgaattcggtagtcgcgtcgcccacctgcggtggggtcgccagctggatatcctgcggcacaatctggccgatcagggcgttaagcgaatccgcgccgacggtcttcagcatctcttgctgctgctgagcgtccgggccaatgtgacgttcaataaaggcgtcgcggttttcaagctgacttaaagtctgagtcatgagcgatggttcctgaaacgtgcggtgaatcgtggttgtctgactggtttgcccggcaagcgctgatgcttaccgggccagaatacgcaaaatcattcgcgttgcaggaaggcggcgacacagcgactccccgggagcttacaaaagtaagtgaccggggggagccaggaagccaacgcccctgcagcgtgaaggatgaagcgtatttattcgtcttccagtaaagcttcatacgcggcggcatccagcagcgcggcaacctgcgcttcgtcgctggctttgatcttgaagatccagccgtcggtatacgggtcgctgttgaccagttccggagagtcgttcagctcttcgttgacggcaacgatttcaccgctaatcggcgcgtagatatcggaggccgccttcacggattcggcaaccgcgcaatcggcgcccgcttcaacggtggcgcccacttccggcaggtcaacgaaaaccatatcgccaagcagctcctgcgcgtgctcggtgatccctacggtataggtaccgtccgcttctttacgcagccactcgtgttctttgctgtatttcagttctgctggtacgttgctcatcaattcatctccaaaaaagggaaatcacacaatggctttgccattgcgtacaaaaccaggtttagtcacttttaccggcatttcacggttacggatttgcaccaccgcggtgtcgccaatcccggccggcacgcgagccagcgcgatgctgtagcccagcgtcggcgagaaggtgccgctggtgataatgccttctttttgattaccgtcgctatcggtaaaacggaccggcagaccaccgcgcaggacgcctttctcggtcatcaccaggccaaccagctgctcggtgcctttttcacgctgcatctccagcgcttcgcggccgatgaagttacgatcggcgggctcccaggcgatagtccagcccatgttcgccgccagcggggaaacgccttcgtccatctcctggccgtacaggttcatcccagcctccaggcgcagggtgtcgcgcgcgccaagaccgcacggcttaacgccagcgtccagcagaccgcgccagaaatcagccgcctgctcgttcggcatcgcaatttcataacccgcttcgccggtatagccggtggtggcgataaacaggtcgcctgcctgcacgccgaagaacggcttcatgccttccacggcctgacgctgagcgtcggtaaacagcgtcgccgccttcgctttcgcctgggggccctggaccgcgataagcgacagatcgtcgcgaacggtaatttcaaggccgtaaggttcagcttgttcggagatccaggcgaggtctttttcgcgggtggcggagttaacaacgaggcggaaataatcttcagaaaggaaatagacaatcaggtcgtcgatgacgccggcggaggcggtcagcatgccggtgtagagcgctttgcctggggtggtgagcttcgccacatcgttggccagcaaatagcgcaagaactcgcggatccggctgccgtggaaatcgacgatggtcatatgcgacacatcgaacatccctgcatcgccgcgcaccgcatggtgctcatcaatctgggacccgtaatgcagcggcatcatccagccatggaaatccaccatgcgcgcgccgcacagcgtgtgttgttcatacaacggagtctgttgagccatcttttcctcatcgaataaaacggaaccagccacgaaattgtcggcgattttgcgccacgaaattcggcgtcggcatcgctgacggacgccgacgcaaacgttatctttggcctgaacttaccaccgaacccggcgctaaaccataagctcattcagggcatcacattagcttatggctaaaatccgccgaaaagcctacagagttattgactggaaaaaagcgatttacgccacataaaattaacattaacggcgcggcaattaggtaatgatggtgttttatgcgattttacggctctaatttctttaacaaaaaaaagggcgcattaataaatctaatgcgaaaaaagaggtgaaattagaatatttcaaatgagggggaaaacccggcgcccaggccgggtgaaagaagtgtgacgcggttaacgtaaccaggcaggcagatcgttgaggcccatcgcctggcgaatcagctgcggtttcacgcccggcagcgtatcggccagtttgagtcccacatcgcgaagaaatttcttcgccggatggctcccggagaacatttcgcggaagccctgcatgcccgccagcatcagcgccgcgctgtgcttgcggctgcgctcgtagcggcgcagataaagatgctggccgatatctttgccctgagcgtgcaggcgcttcagctcgtcaataagctcggcggcatccataaaaccgaggttgaccccctgcccggccagcggatggatggtatgcgcggcatcgccgaccagcgccagtcggtgggcggcaaactgacgggcatagcggccggtcagcgggaaaacttcacgttcacttgccagctggcagaggccaaggcgattatcgaacgcgatattcagcgcctggttgaaggtggtttcatcagcctgctgcatccgctgcgcttccccggcgatagcgaccagacgatcgagcacaggtgcggatcgctgagcggcaggaaggcgaggatcccgtcgccatggaacgcctggcgggccaccgcctgatgcggctcagcggtacggatggtcgccaccagcgcatgatgatggtaatcccagaaggtcagcggaatatcggctttattgcgcagccatgaattggcaccatcggcgccgatcaccagccgcgcggtcagcatgctgccgtcctgcaggctgagaaaggcttcattctcgccccacgccacctgctgaagttccgccggagccagcagggtaacgtcagcgcaacgctgcgccttctgccacaatgcatgatgcactacggcattttcgataatatagccaaggtggctaaagcccatgctctggtcatcgaagctaatgtggccaaagctgtctttatcccacacttccataccgtgatagcagctggcccgctgggcgacgatctcgcgccagacgtccagctttgtcagcagcttttcgctggcggcattaattgccgaaacgcgcagcgccggcggcgcatcggcggccagcggtcgcggctctgctttctccagcactgcgacgcgcaggccgctaccctgtagaccgcaggctaccgccagccccaccattccaccgccaacaatggcaacatcaacactttgcacgttctactccttaacggggaacccaaccgagggtacgctgcgccagcgcatcgcgcgccggggtaaataattccatcgccatcagaccgacgttgcgccccgccaccagcggcgcccaacggttggcaaacagatgcaccagcccatcggtcacgccgatggtggcggctttatcccctgccctgcgcgcctgatagcggcacagcagcggataatgaccgaaatcttcgccgctgagatgggcgtcagcgagtaattccgccaggctcatcacatcgcgcaggccgagattaaagccctgcccggcgatcgggtgcagcgtctgcgccgcgttgccgaccagcgccaggcggtgcgacaccgcgcggctggcggtggtgagggccagcggatagacgctgcgcttcccggcgtgggtaatacgccccagccgccagccgaacgcctgctgcagctcctgacaaaagcgttcgtcagaccagctctgcacctcatcgcggcgcgactgcggatgacaccacaccagcgagcagcgcccttgcgacatcggcagcatcgccagcgggccatgctcggtaaagcgctcgaaggcgcgaccttcgtggggcaacgcggtgctgacgttagcaatgatcgctatctgctcatacggctgctgctgccagctgatgccgcagcgggcgcccagtgccgaacgggaaccgtccgccgccaccagcagcttaccgttaatgatttcgccgccctcaagcgtaaggctgacgctctcctggctgcgactgaccgcttccactttcgccggacagtgcagcgtgacgcctggcgcctcgcgcagcagaccaaacagccgctggccgacatcgtggagttcaaccacctggcccagcgccgacaggccataatccgccgccgccagattcacaaacccggcatgaccgcggtcgctgacgtgtactcgctggatgggcgtcgcgcgttcggcgaggcgttgccagataccgatacgcgccagctgctggcaggtgcccgcagccagggcgatcgcccggtcgtcaaagccagggtggcgtgacgaatgcggatcctgcgcttcaatgaggtggaccggcagcgcgccgccagtcaaacgggagatggccagcgcgagcgtcgccccggtcatcccgcccccgacgatcagcacgctcatgactggcgcgccgccgccatcagcgcctcgatctcatccgccttcttcaccacgccggcggtgagattttcgttaccgtcttcggtaatcacgatgtcatcttcaatacggatgccgatgccgcgatactgcgccggcacgtcggcatcggtggcgatatacagtcccggctcgacggtcagcaccattcccggctccaggacgcgcgaacggtcggtgtcgtaattaccgacatcgtgcacatccagacccagccagtggctcaggccatgcataaagtacgggcggtgggcgttgttggcgataagctcgtcaatctcgcctttcaggatccccagccgcaccaggccggtaatcataatgcgcaccacttcctggttgacctgacagatcgaggtgcccggccgatagagtttcagcgcggtctccagcgattcgagcacaatgtcgtagatctcgcgctgcggctgggtaaatttaccgtttaccgggaaggtgcgggtaatgtccccggcatagccgcgatactcgcagccggcgtcaatcaggactaaatcgccgtcgcgcagttcagattcgttttcggtgtagtgcagaatacagccgttttcgccgccgccaacgatggtgttataggaggggaaacgtgccccgtggcggttgaattcatggagaatttcaccttccagctgatattcgaacatgccagggcggcatttttccatcgcccgggtatgggccagcgcggtgatctccccggcgcggcgcatcacggcaagctcttccgcggatttaaacaggcgcatctcatgcacaatgggccgccagtcgataaccgagttcggcgcctgcagattctggcgcgcgcctttgcgcagtttttcgagggcgttgaacacaatctcatcggcataggcatattcaccctgggcgaagtagatcgcgtccagaccgttgagcagctgatacagctgctggttgatttcgctgaacgccagcgcccggtcgacgccaagcttcgccggcgcggcctcctggcccagacggcgtccaaaccagatctcagcggtcagatcgcgaacccggttgaacagcacgctatggttgtgggtttcatcgcttttaatcaacaccagcagcgcttccggttcgttaaagccggtgaagtaccagaaatcgctgttctgccggtagggatattccgaatctgcactgcgcaccgcttccggtgcggcgaaaatcagcgccgcgctgcctggctgcatctgcgccaacagcgtctggcgacgcgatagaaattcctgctgagtcatgacgccccctgaacgaattttagttagtgtaatgtcggtttgcggacttccggtgcggttggctgctgacgggcaaaggtgtcgtggcacagcagtgcggcaacgcggacatactcgataatctcctccagagacatctccagctcttcctgatcttcgtcttcatcgtagcccagctgggcaatattacgcagatcgtcaatcgcttccccggtttcatccttcactttatccagcttcggctggctaacgccaagaccaagcaggaagtggttgacccaaccggcgagggcgtcggcacggtcaaagacgctcaccgcatcgccttccggcagatacagttgaaagaggaaaccgtcgtcatccagtgaatcgctgatggcggaatgcatgttacgcagcgcctgagccagttcatggccaaaggcgagaccttcgttggtcaggtcgtgcaccagcggctgccagctgctgtccgtgttgccgccgcacagcaatccgctgatcaaaccgtgcatttcggccggggtgagacctaccccttgttggttcagtaactggtctacatcgttgtaaccaggcatttcgttctgtatagacatgcgcattcgtcatcgttgggaggaatattcatggtatgctaccactttggaccctggtgaaccagaatagggcttgtatcttcgcaccagggtagctatagtgtcgccccttcgcagacccgggccagggtgtgaaggcagcgcagtcaatcagcaggaaggtggcatgtctgcacaacccgtagatctccaaattttcggccgttcactgcgagtgaattgcccgcctgaacaaagggatgccctgaatcaggcagctgaagaccttaatcagcggttgcaagatttaaaagaacgcactagagtcacaaatactgagcagctggtcttcatcgcggcgttgaacatcagctatgagttgactcaggaaaaagcgaagacccgcgactacgcttccagcatggagcagcgcattcgcatgcttcagcagaccatcgaacaagcattgcttgagcaaggtcgcataagcgaaaagccagggtcgaagtttgaataacactttgcagttaactgtgttagagtaatcgcaagaacaaaatttctctgagatgtttgcaagtgggccagtcccctgagccgatatttcataccacaagaatgtggcgctccacggttggtgagcatgctcggttcgtccgagaagccttaaaaccgtgacgacacattcaccttgaaccaagggttcaagggttacagcctgcggcggcatctcggagattcccttctttacttcgcatcatcccccatacgtgttttcggctgaagccgccctgtattacacttgctcctattgtttcgccagctcgtaacgagacctgcatgactatacagcccgataccctgctctcccgtcagcatattcgccagcagatccgcgatcgtcgacgcgcactcagcccggagcaacagcgcctgtttgcccaacaggccgccgagcggatgatggcctggccgccggtagttctcgcccacaacgtggcgctgtttctctcctttgacggcgagctggacacccagccgctgatcgaccagctctggcgcgccggcaagcgggtatatctcccggtgctgcatccctttagccccggcaatctgctgtttttacactaccatccgcagagccaactgatcgtgaatcgcctgaagatccgcgaaccgaagctcgatgtgcgggatgtgctgccgctggctgaactcgatgtgctggtgaccccgctggtggccttcgatgtcagtggccaacggctgggaatgggcggcggtttttacgaccggacgctgcaaaactggcagcagtatcgcctgcagccggtgggctacgcgcacgactgccagcaggtggatagcctgccgagcgaagagtgggatatcccgctgccggcggtcatcaccccgggaaaaacctggtgttggtaggtacgcggggacgagaaattcagcctggaaagtattaacaaaaaaacgggcaggtacgcgacctgcccgagaggcaaaaatgattagaacagcagacgggcgcggatagtccccgggatcgctttcattgcctgcagcgcctgctgggcaacatcttcttccgcttcaatatcaatcaccacgtagcccatctgcggcgacgtttgcagatactgggcggcaatgttgatgctctgcgcggcgaagatttggttgattgcggtcaggacgcccggccggttctcatggatatgcagcagacggcggccgccgtgcagcggtagagaaacttccgggaagttaactgccgacagggttgacccgttgtcagagtatttcgccagcttgccagctacttccagaccgatgttctcctgcgcttcctgagtggagccaccgatatgcggtgtgaggatcacgttatcaaactcgcacagcggggaagtgaaggggtcgctgttggtcgcaggttcagtcgggaagacgtcgatagccgccccggccagatgcttactggccagcgcatcgcatagcgccggaatgtccaccacggtaccgcgggaggcgttgatcagcagcgcgcccggcttcatcagcgccagttcttccgcgcccatcatatttttggtagaggcgttttccggcacgtgcaggctgaccacatcgctcatgttcagcaggtcggagagatgctgtacctgagtggcgttgccgagcggcagtttgttttcaatatcatagaagaagacgtgcattcccagcgattccgccagaatgccaagctgggtaccgatgtggccgtaaccgatgatgcccagctttttaccacgcgcttcgaagctgccgaccgcctgcttgttccacaccccgcggtgcgctttggcgttggcttccggcacgccgcgcagcatcagcagcagttcgccgatcaccaactcggccaccgagcgggtgttagagaacggcgcgttaaacaccggaataccgcgcttcgcagcggcgttcagatcgacctggttggtcccgatgcagaagcaaccgacggcaaccagtttttccgctgcggcgaaaatctcttcagtcagatgggtacgggaacgcaggccgatgaaatgggcatcacggatcgacgctttcagctgttctgaatccagcgcgcctttatgaaattcaatgttggtgtaacccgctgcgcgaaggctatcgattgccttttgatgcacaccttcaaccagcagaaatttaatcttgtctttttccagtgataccttagccatttccccgtcctgttttgtcttaactgatgtcgtgctgaacgaaagttcgtctcagcaacatatcaaaaaaaactatcgcggcaatatgaacgtttgcgtcgccgtcctgaagaaatgtcatccagagggaaatcgcaggacaaaacaccagaaagagaagaaatggtagcgtgtaaatcagaatggttgcataaatgtgacagaagtcaccaaattgcacctggtgaaaaaatatttgcgagggagccggtcggctccctgcggacagactattttacgatggtcttcacgccgtcggcagtaccaatcagcgccacgtcggcgccacggttggcgaacagccccacggtgacgacgccaggaataccgttgatcgcgttttccagcgcgatcgcatcgagaatttccaggccgtgcacgtcaaggatcacgttgccgttatcggtcaccacgccctgacggtactctggacggccgcccagcttgaccagctgacgcgccacggcgctgcgcgccatcggaatgacttccaccggcagcgggaacttgcccagaatatcgacctgcttggaggcgtcggcgatgcagataaacttatccgcgaccgaggcgatgatcttttcacgggtcagcgccgcgccgccgcctttgatcatctgcatatggccgttgatctcatccgcgccgtcaacatagatccccaggcgatcgacgctgttaagatcgaagacggtgatcccgaggcttttcagcttctcggtggaggcgtcggagctggaaaccgccccttcgatctgccccttcatggtgcccagcgcgtcaataaaatgggccgccgtcgagccggtgcctacgccgacaatagtccctggctgtacatattgcagtgctgcccaacctaccgcttttttcagttcatcctgcgtcataattctggtccgagatgtgaatgcctgtggcgcattatagaacatcgatagtggaaatgtccctgcgatgcagatcacacaactgaacagaccaatttcgtctgtatcaaataaaaatttatgtcatagtgcgagataacgattagttatgggggcacgccagaataatgaaacgaccggactacaggacactacaagcgctggatgcggtgattagggaacgaggatttgagcgcgccgcgcagaagctatgtattacccagtccgccgtctcacagcgtattaagcagctggaaaatatgttcggccagccgctgctggtgcgtaccgtgccgccgcgccccaccgagcaaggacagaaactgctggctctgttgcgccaggttgaactgctggaggaagagtggctgggcgatgaacaaaccggctcgacgccgctgctgctgtcgctggcggtgaacgccgacagtctggcgacctggctgctgccggcgctggccaacgttctgtcagactcccctattcgtctcaacctgcaggtggaagatgaaacccgcacccaggagcgcctgcgccgtggcgaagtagtgggcgcagtgagtatccagccgcaggcgctgccaagctgcctggtggatcagctgggggcgctcgattacctgtttgtcgcatcaaaagagtttgcgcaacgctatttcccgaatggcgtgacgcgttcggcgctgcttaaggcgccggtcgtcgccttcgaccatctggacgatatgcatcaggcgttcctgcagcaaaacttcgacctgccgccgggcagcgtcccctgccacatcgtcaactcgtcggaagctttcgtgcagctggcgcgccagggcaccacctgctgtatgatcccgcatctgcagatcgaaaaagagctcaacagcggcgaacttatcgatctcaccccgggcctgttccagcgccgcatgctctactggcaccgcttcgccccggaaagccgcatgatgcgccgggtgaccgatgcgctcattgactacggacacaaggtgctgcgtcaggattaaaccgcgggcataaaaaagccacttcgctgaagtggcttttttgtttctatcgcttactgggccggtttcggcgtttccgccggtttcgccggggtggctggagcagcggcttgcgccggctgcagctcaaagactacatcgacctggtcgtcaaactggatagtcgcctgctcgtaggtttcctgggcagaaaccggcgcagcgtcagcggccttcatcatgcgaaccatcgggctcggctgatagttggagacatggtagcgcacgctgtacaccggacccagcttgctgtggaagcctgcggccagctcctgcgcctgatgcacggcgtcgtcgatcgccgctttacgcgctttatctttgtaggcgtccggttgcgcaacgcccagcgagacggagcgaatttcgttgagacccgctttcagggcgccatccagcagaccgttgagtttatccagctggcgcaaggtcacttccactgtgcgcaccgcgcgatagcctttcagaatgcttttcccgttctgatagtcgtaatcaggctgggtacgcagattcgccgagttgatgtcctttttagcaataccgctcttttcgaggaaagagagatattgcgcaacgcgatcgtcagcctgtttttttgccgacgcggcgtcttttgccgacacgttcacttcgatcgccagggtggcgatgtccggaaccgcggcaacgcttgctgtgcctgaagtcacaatgtgcgggccatccggcaattcgctggcctgtgccgccatcgtggtcaatccgagtgttgccgccagggctaagacttttaacttcactgtcgtttctccatgttacttaaatcgcccttacgggacgcatgccagcaagcttagcgcgtacagcaggaaagtccatcggacaacgcttagttaagcaacgcctggatatggctgacgccttctcttgccagctgaaacgcaataaaccacatgacggcgccgaccacaatattgatgatccgctgagctctggcggtacgcagtcgcggcgccagccaggcggctaacagcgccaggccaaagaaccacaggaaagaggcgctaatggtccctagcgcaaaccagcgcttcggctccaccgccagctgacctcccaggctgcctaacaccacaaaggtgtccagataaacgtgcgggttaagccaggtcaccgccagcatggtgataatgattttccagcgcccctgctgcattacctctgcattggcgagttcaagactctgactgaacgccgttttcaatgcgccgaagccataccacagcaaaaaggccacgccgccccaggtcactagcgccagcagccacggggattgcatcagcagtgcgctaccgccgaaaatgccagcgcagattaacagcaagtcgctgaccgcgcatagcagggcaatcatcagatgatactgacgacggatcccctgattcatcacaaaggcattttgtgggccaagcggcaatatcatagccgctcccagggcaagcccctgaaagtaataagtaaacataaggatttatccgctgagttcgagagtggcgctgactatagcgcgaatgaattattagcggaaattgaaagaattaatcattaattagaactactaatgatgagctattgaaaaaggccggcatggccggcctgagttattgagaggcgctttactctgctttttccggcaggcgcaccacatgaacatccatctgcgggtaagggaagctgatgccgttggcgtcaaattcacgcttgatacgctcgaggatatcccagtagacgttttgcagatcgctgcttttgctccacacgcgcaccacgaagttcaccgacgaggcgccgagttcgttcagacgaacggtcatttcccgatcgcgcagaattcgatcgtcagattcgataatcgaggtcagcagctgctttaccttgtcgatatcagcatcgtaagcgacgccgataataaactcattgcgacgcgcaggctcccgggagaagttaatgatattgccggcgatgattttcccgttcgggaccaccactactttaccgtccgcggtacgcagggtggtggagaaaatctgcacgttcaacaccgtacctgccacgccgccaaggtcgacatactcgccagcgcggaacgggcggaacatcaccagcagtacgcctgcggcaaggttcgacagcgatccctgcagcgctaaacccaccgccaaaccggcagcacccagcaccgcaatcaccgaggcggtctgcacgcctacccgccccagggcggcaatcagcgtaaaagcgataaccgcatagcgcaccagcgcagagagaaaatcggccacggtagcgtcaattttacgcgccagcatcaggcggttgacggtattagagacgacgcgcgccacgatcatcccgacgatcaggatagcgatagccgcgacgatgttgacggcatagctcagcagcagctcctggttgcgtgccagccacgtcccggcgtggttgatgctatcgacaacgttcaaatcttccatttaacattccttatgaatcccctggggggaagtaaataactcagcctgcgacagggcagtcaggttatagggtaaacaataagtgcacgttttgccaaatggatcacagttttctgccacgctatcctgttgttaagataataaaaaagcccgcattgctgcgggcttccgggtaagaaacagatttttcttacagaacgtcgatcgcgttcagctctttaaatgcctgctccagacgagtcaccatggaagtctgggcagcacgcagccatacgcgcgggtcgtagtatttcttgttcggctggtcttcgcctttcgggttgcccagctggccctgcaggtaagcttcgttcgctttgtaatactgcaggataccgtcccaggttgcccattgggtgtcggtatcaatgttcattttcaccacgccgtagctgacggagtctttgatttcctgagcggaagaaccggaaccgccgtggaacacgaagttcaggctgttgtgcggcaggttgtgtttcttggaaacatattcctgagagtcgcgcaggatggtcggggtcagaactacgttacctggtttgtacacgccgtgtacgttaccgaaggaagcggcgatggtgaaacgcgggctgattttgctcagctcggtgtaggcgtaatccacgtcttccggctgggtgtacagggcggaagcgtccatgtggctgttatccacgccgtcttcttcaccgccggtgcagcccagttcgatttccagggtcatgcccattttggccatgcgcgccaggtacttagagcagatctcgatgttttcgtgcagggactcttcagacaggtcgatcatgtgggaagagaacagcggtttgccagtagcggcgaagtgtttttcaccggcgtccagcaggccgtcgatccacggcagcagtttcttcgcgcagtggtcagtgtgcaggataaccggcacgccgtagtgttcagccatctggtgcacgtggtgggcgccagagatagcgccgaggatagcagcaccctgaggaacgtcagttttcacgcctttacctgcgatgaacgctgcgccgccgttagagaactgaacgataaccggagagcgaactttcgctgcagcttccagaacggcgttgatggaatcagtacctacgcagtttaccgccggcagtgcaaagttgttttctttcgctacctggaacactttctgaacgtcgtcgccagtgatgacgcccggttttacgaaatcaaaaattttagacatgttacttagtcctgtatctgtatcttcgaccgttgaagaaggttcgcgagcccttaagcgcgctgaaaaacaggcgggtttccccgcctgaactgaattactgcttagcgcgctcttcgagcatcgctactgccggcaggactttgccttcgacgaattcaaggaatgcgccgccgccagtggagatgtaggaaattttgtcagcgatgccgaacaggtcgatcgctgccagggtgtcaccgccgccggcgatggagaaaccttcgctgtccgcgatagcgttagccacgatttcagtccctttacggaagttagggaattcgaatacgccaaccgggccgttccacaggatggttttggcgttcttcaggatttcagccagtttctgtgcggaaacgtcgccaaggtccagaatctgctcgtcatctttgatgtcgttaacagatttcagggttgccgttgcggtttcggagaactcggtcgctacgcgaacgtcggtcggaaccgggatatcgcaggtgcccagcaggcgcttggcttcatcaaccagatctgcttcgtacagggatttaccgacgttgtggccctgagcggcaacgaaggtgttagcgataccgccgcccacgatcagctggtcagcgattttagacagggaatccagaacggtcagtttggtggacactttagaaccaccaacgatagcgaccatcggacgagctggctctttcagcgctttacccagcgcgtccagttcagcggccagcagcgggcctgcgcacgccacgtcagcaaatttgccgatgccgtgggtggaagcctgcgcgcggtgcgcagtaccgaaagcgtccatcacgaacacgtcgcacagcgcagcgtatttcttagacagttcttcgtcgtcttttttctcgcctttgttgaagcgaacgttttccagcaccaccagttcaccggcagccacttccacgccgtccaggtagtctttaaccaggcgtaccgggttggacagtttgtctttcaggtaattaacaaccggcagcagagagaattcttcgttgtactcgccttcggtcggacgacccaggtgagaagtaaccatgactttcgcgccctgcttcagcgccagttcaatggtcggcagagatgcacggatacgtgcgtcgctggttactttcccgtctttaactggtacgttcagatccgcacggataaaaacgcgtttaccagccagatccagatcggtcatcttaattacagacatggtgaatcctctcgttgattcataaagttttgtcgacgtttacgcgtcgaacctgaaaccaatagccgccatcgctaacgtcgtgtcgagcattcggttagcaaagccccattcgttatcgcaccagaccagcgttttgatcagatgcgcgccactgacccgggtttgcgtaccatcgacgatggcgctgtgcggatcgtggttaaaatctgtcgagaccaacggtaattccgtatagtcaactataccatgaaatgcaccttgtgctgctttttgcagcaactggttgacttcacatgcttttaccggttttttcaccgtcacgctcaggtcaattgccgtcacgttaatcgtcggcacccgcacggcaatcgcttcaaaacggtcgttaaattgcggaaaaatacgggtgatccctgccgccagtttggtatccaccggaatgatcgactggctggccgcgcgggtacgccgcagatccggatgataagcgtcaatcacctgctggtcatgcatcgccgagtgaatggtggtgacggtgccggactcaatgccataggcgtcatcgagcagtttaatgatcggaataatgcagttggtggtgcaggaggcgttggagacaatgcgatgcccggcgcgaagttcatcctgatttacgccgtacaccaccgtcgcgtcgaggtcgttgccgccggggtgggaaaagagcacttttttcgcccccgcctgaagatgggcttcaccgtgttcacggctcccgtatacgccggtacagtcaagcacgacgtccaccgccagttcgcgccagggcagcgccgcaatggtcggctcatgcagcagacggatggcatcgtcgccaacaaacagctgctcgcgctcctgacggacatcccaggcgaaacggccatggctggtgtcatatttcaataaatgcgcgatgcccgcggcatccgccagctcattgattgccaccacggtgatttccgcacgacgcccggattcatatagagcacgaaccacgttgcgtccaatgcgaccgaagccattaatcgcgatgcgaatggtcatagatctcctgcaaggctgtccctgttatgaggtggctgacagagtaatccagcaacgctctgaggggaaccttaccagctgcaaactgcgactgattgattaattgtcgaacatttaaacgactgaaacgcttcagctagaataagcgaaatgaggaataaaaggaatgtttgtccagcgcaataaaccagctatatgactcacatcacatttttgctggaataatttacaaccgtattacatggttcaggaatagcagatacaaaaaagccgggtggcgagataaaagcaaaacggtaacccaggggttaccgttttggtgtttgcaccctctcctgtgggagagggttggggtgagggcatcagcccgcaccgtaccagcgattacagcagcgctttcgctttagcgaccacgttatcaacggtgaagccgaactcctcgaacagctgctcagccggcgcagactcaccgaaggtggtcatgccaacgatagcgccgttcaggccaacgtatttgaaccagtagtcagcgatacccgcttccacggcaacgcgcgcggtcacggctttcggcagtacggattcgcgataagccgcatcctgcttgtcgaacgcgtcggtggacggcatggaaaccacgcgcgccttcacgccttcggcagtcagtttgtcccatgcggcaaccgccagctccacttctgaaccggtggcgatgaagatcagctccggctggccggcgcaatctttcagcacataaccgccgcgggccacgttcgccagctgctctgcggtacgctcctgctgcgccaggttctgacgggagaggatcagcgcggtcgggccgtcctgacgctccacgccatatttccacgcaatcgcggattcaacctggtcacacggacgccaggtggacatgttcggggtcacgcgcagggaagccacctgctctaccggctggtgagtcgggccgtcttcgcccagaccgatggagtcgtgggtgtagaccatcacctgacgctgtttcatcagcgcggccatacgtaccgcgttacgcgcgtattccacgaacatcaggaaggtggaggtgtacggcaggaagccgccgtgcagcgcgataccgttggcgatagcggtcataccgaactcgcgcacgccgtagtggatgtagttcccggcagcgtcttcgttgatcggcttagagccagaccacagggtcaggttggacggcgcgagatctgcggagccgccgaggaattccggcagcagcgggccgaaggcttcgatggcgttctgcgaggctttacggctggcgattttcgccgggttggcctgcagcttcgcgatgaactcgttagctttcgcgtcgaagtcagacggcatctcgcctttcatacggcgggtgaattcggctgcttcctgcgggaaggctttggcgtaggcagcgaacttctcattccacgccgcttctttcgcctggccggcttctttggcatcccactgggcatagatgtcagacgggatgtcaaacggcgcgtgtttccagcccagcgcttcgcgggtcagggcgatttcggcgtcgcccagcggcgcgccgtgggagtcgtgggtaccggctttgttcggcgaaccgaaaccgatgatggttttgcacatcagcagggacggtttgtcggtgaccgcccgcgcttcttctaccgcacgtttgatggcgtcagcgtcgtgaccgtccacgccgcgcaccacgtgccagccgtaggcttcaaagcgtttggcggtgtcgtcggtgaaccagccttcaacgtggccgtcgatggagatgccgttgtcatcatagaacgccaccagtttacccagtttcagggtaccggccagggagcacacttcgtgagaaatgccttccatcatacagccgtcgcccatgaaggcgtaggtgtagtggtcgacgatatcgtgtcccggacggttgaactgcgccgccagggttttctcggcgatagccatcccgaccgcgttagcgataccctggcccagcggaccggtggtggtttccacgcctgcggtgtagccgacttccgggtgacccggagttttggagtgcagctggcggaagtttttcagctcttcaatcggcagatcgtagccagtgaggtgcagcaggctgtaaatcagcatcgaaccatggccatttgacaacacaaaacggtcacggtcagcccaggccggattgttcgggttatggttcaggaaatcacgccacagcacttcggcaatgtcagccatacccatcggggcccccgggtggccggatttggctttctgtacagcgtccatgctcagcgcacgaatagcgttagcaagctctttacgtgaggacattttgactccagttcggactgttgaaggccatgcccttaacgacttgacgagagcgcgttttgggctacgccggaaaaaagtgtgaacaatgtaacccaagcgacaagtcatgtacatggagcatccttttgccctttaagaaatctctggaacaggttgtgctacgccggaatccgctcgcccgcatcctgcgatactctttataatttacgcagaatacggttccctgccgtcgccgtattttcggataaacaaccataagattgtggaagataaaaatgaaaattcgctcaaccgtacttgctcttgggatcgcagcaaccctcaccggatgtcagaacatggactccaacggtctgctcagctcaggcgccgaagccttccaggcatactctctcagcgacgcgcaggtgaaaaccttaagcgaccaggcctgtaaagagatggacgccaaagcgaaaatcgccccggccaacagtgaatacagccagcggctgaacaaaatcgcggctgcgctgggcgataacatcaatggtcagcccgtgaactacaaggtctatgagaccaaggatgtcaacgccttcgccatggccaacggctgcatccgcgtctacagcgggctgatggatctgatgaacgataatgaagtcgaggcggtgatcggccacgaaatgggccacgtcgcgctgggccacgtgaagaaaggcatgcaggtcgccctgggtaccaacgccgtgcgtgcggcggcggcctccgcgggcggtatcgtcggtagcctgtcgcagtctcagttgggcgatctgggcgaaaaactggtgaactcgcagttctcccagcgtcaggaatcggaagcggatgattactcttacgacctgctgcgtaagcgcggtatcaatccgtcgggactggccaccagcttcgagaaactggccaagctggaagccggtcgtcagagttcgatgtttgacgatcacccggcctcagaagcgcgcgcccagcatattcgcgatcgcatgaaggccgacggcattaaataagcgacagcgggaggcgctagcgcctcctcaccaatctttgccagccaacaatcaaatagccagggctttattgaagacagccacttggaactctttttacgtaacgcttatacccgtcatacttcaagctgcatgtgcgttggcaataactcggcctatccctgggcctcgcccctacggggccagcgcaagcgctgttcaaaacggctagccgttttgtccggcaactcgaaatatttagggtatataccaaacgtgattatcgcgatgggttgccggataaagccgaatggggccaggggattatcgccaccttcaaatcggggtttacccagggaccggtcggcttcggtgtggactgtatcgcccagtatgcggtgcgccttgacggcggtcgcgggcccagcggcctgcgccttgattaaccccctgtaccgtacggcacagggggttaccggggttattcgcccttcttcgccgcctggatgtacagcatctccagcgccagggtcgccgccgccagagcggtaatttcggactgatcgtaggccggggcgacttccaccacgtccatcccgacgatgttcaggtccttcaggccgcgcaccagcttgatcgcgcggtcggaggtcagcccaccgataaccggggtaccggtgcctggcgcaaacgccggatccagacagtcgatatcaaaggtcaggtacaccggcatgtcgccgacgatctgcttcacctgggcaatcacgtcatcaacgctgcggtcgttaacctggccggcgtcgagcaccgtaaagccattgtctttgtcgaattcggtgcggatcccgatctgtacggagtggttcggatcgataagcccttcattcggcgcggtatagaacatggtgccgtggtcgaactcgcagccgttggcgtaggtatcggtgtgagcatcgaagtgcaccagcgccattttaccaaagtgcttggcatgggcgcgcagcagcggcagggtaacgaagtggtcgccgccaaaggagagcatacgtttgccggccgccagcagcttctcggcgtgagcctgcagcttctcgctcatttcgcgcgcgtcgccgaaggcgtacaccagatccccgcagtccaccacgttcaggcgctcgcgcatatcgaagttccacgggaaacggttgtgctcccaggcaaggttagtagaaacctgacggatcgccgccgggccatgacggccgcccgcgcgcccggaggtcgccatatcgaacggcacgccggtgatgacccagtccgcatcgctttcatacggcataaagttcattggcaaacgcagaaagccaaaggcattggataccagggagttatcgtattgatgacctaaagtgctcatggatatgacctcttttgacagtcgtggaacgtaaaaaataagtataaaaaaacccctccgcgtcgttaggcccgacgaggaagggtttgatagataaatcgcttattggcgtgaattatcgccggtaatgcatacgggttcaagtgagtatcgcatgctgccggatgacggcttcgccttatccggccgacatacgcaggcccggtcagcgcagcgccaccgggcatcagcagctactcgtcttccagataagtatagccgtacagtcccgcctcgaactcctcgaggaactgctgctgcagcgcgtcgtccagaccggtatttttcacctgatcgcggaactgggtcagcagcgtattcggatccagctgcacatactgcagcatatccgccacggtatcgccctcgtcggacagctcaacctcaacgctgccgtcagggaagacgaacacgtccaccgcctcggtatcgccgaacaggttatgcatgttgccgaggatctcctgataggcgccaaccatgaagaagcccagcatcggcgggttctccgggtcgtattctggcatcggcatggtggtggcgatcccgtcgccgtccacgtagtgatcgatggcgccatcggaatcgcaggtgatgtccagcagcaccgcgcggcgctccggcgacttgttcagcccttccagcggcatcaccgggaacagctgatcgatcccccaggcatccggcatcgactggaacaacgagaagttgacgtagattttatccgccattcgctcctgcagctcatcgatgatgggacgatgggcgcggttgctcgggtcgagctgcttctgcacctcatggcacatgttcagatacagctgttccgcccacgcgcgctcctgcaggttgaaggtgcctgaggagtagccgatgtggatatcgtgcaggtccatctggctgtcgtgcagccattcgcgcagcgagcggcggttgccggtctcgtgcatctcaagccaggtttcccacatgctctgcagcggacgcgcagcgtcttccgccggcggggtcgcctcggtgtattcgttacgctcaacgccgatgatgttggaaaccagcacggtatggtgcgcggtcaccgcgcggccggactcggtgatcaccgtcgggtgcggcaggccattctcttcgcaggcatcgccgatcgcccagatgatattgttggcgtattcgttcagaccgtagttcaccgagcaatcggactgcgagcgggtgccttcatagtccacgcccaggccgccgccgacgtcgaagcactgaatgttgacacccagcttatgtagttcgacgtagaaacgcgccgattcacgcacgccggtggcgatatcgcgaatgttagccatctgcgaaccgaggtggaagtgcagcagttgcaggctctcaagatggcctgcctcgcgcagaatttcgaccagttgcagcacctgggtcgctgcgaggccgaacttggacttctcgccgccggaggactgccatttaccggagccctgcgaggccagacgcgcacgtacgccaaggcgcggcaccacgttcaggcgctcggcctcttccagtacgatagcgatctcggacatcttctcaatgaccagatagaccttgtggcccatcttctcgcccaccagcgccagacggatatattcgcggtctttataaccattacagacgatgacgctgcgggtcatcccggcgtgcgccagcacggccatcagttccgctttcgaaccggcttccaggcccagcggctcgccggaatggatcagcgattcaatcacgcgacggtgctggttaaccttgatcgggtagacgaggaagtaatcgccgttatagccatacgattcacgcgcgcgtttgaaggcggcgttgatcgagcgcaggcggtgctgcaggatctgcgggaagcagaacagcgccggcaagcgctgcccttgcgcttcacgcgctttgactaattccgcgaggtcaacgcgcgcttccggaacgtccggatccgggcaaacgctgatgtggcccagttcgttgacgtcataatagttattgccccaccaggcaatattataagtacgcagcatcttgctggcttcctgggagctcatcgctacctcctgcatggaacgtagtacaccgtgttcgcctgctgacgaaggcgaaaccatagacatgtcgtcagacatagcgaacctcaatttttaataataagtgtaagacagttaactactatcgcagtccaaagatgcgataacaacccatgaacagtcctaaagcccagcactatctgctggttttgcgactgcgcgaccggtttcttattcatatcatcgtaaaacacgtagccgaacagagtatgacagtccggagaaaccacgagaaaactcttgccaggcaagagcgcccttgttcagttttctgacggccgaccggccctggaatcctgagaagcgccgagatggggtgaacatcggctggtttgcatgagagagatgcaggttgcggagtgctgacgcgcgacagaacgacgcgacgaatcaaacgaaaaacattggttcattatctggtatcacctccacaccgccctgcgacagggtcggcgacaagccaaagctatacataccgggcaacaggcgctacgccgctgcgagattctgtaaatacagactgcttaacccggctggaagtggcaccacagggccatgccccgtgcgcttttttaatgagccgcgcgcggcgttttataccgagaagcggggtaaaaagcaaaataaaaatgtgcctgtttgcgcggttgtcaggaaattttgccaggcgggttttcccataaatgcgaccgccatcaaaaaaggctggaaatgggctcaagatttgacctaaaatggccgtccagaagttaatccgtctatactgattaacactcagactgctcgtgtcgctacctgcgcggctttgcgctgattatccaccaaagccacattacacaacagtatgagctatccgaatcgtccacaggtgaaataaaatatggcaaaacacctttttacgtctgagtccgtatcagaagggcatcctgacaaaattgctgaccaaatctccgatgccgtgctggatgcgatcctcgagcaggatccgaaagcgcgtgtcgcatgtgaaacctatgtcaaaaccggcatggtgctggtaggcggcgaaatcaccaccagcgcatgggttgatatcgaagagatcacccgcaacaccgtccgcgaaattggctacgtgcattccgatatgggctttgacgccaactcgtgcgccgtactgagcgccattggcaaacagtctccggacattaaccagggcgttgaccgtgccgatccgctggaacagggcgccggcgaccaggggctgatgtttggctacgccactaacgaaaccgacgtgctgatgccggcgccggtgacttacgctcaccgtctggtgcagcgtcaggctgaagtgcgtaaaaacggcaccctgccgtggctgcgcccggatgcgaaaagccaggtgaccttccagtatgacgacggcaaaatcgtcggcatcgacgcggtcgttctgtcgactcagcacgcggaagatatcaatcagaaatccctgcaggaagcagtgatggaagagatcatcaagccgattctgccgaccgaatggctcaacgcgtccaccaaattcttcatcaacccgaccggccgtttcgttattggcggcccgatgggcgactgcggcctgaccggtcgtaagatcatcgttgatacctacggcggcatggctcgccacggcggcggcgcgttctccggtaaagatccatctaaagttgaccgttccgcagcctacgcggcgcgctatgtggcgaagaacatcgttgccgcaggcctggccgatcgttgcgaaattcaggtttcctacgctatcggcgttgcagaaccgacgtccatcatggtggaaacctttggcaccgagaaagtgccttctgaacagctgaccctgctggtgcgcgagttcttcgacctgcgtccatacggtctgattcagatgctggatctgctgcacccgatctacaaagaaaccgcagcctacggtcactttggtcgcgaacatttcccatgggaaaaaaccgacaaagcggcgctgctgcgggaagcggccggtctgaaataatctccgcgcttcctctcttcaaggccagcctcgcgctggcctttttatttacgcctccccccttttctgcgcccccatttcaacgcgcggccgccaaaaaatgaaagcgattacatagtaaagactgtcaccttctgcccaaagacgctatctcctgtactcatttttcacaatgttacatattgtttcggtcaactctgattaccgtttttcaaaatgtcgtctatccttgtttatattgctgatttaaaaagcatttaatgaattacgtttctttacctttgtggaaacgattacacagccgtgattatagtcacgtttttttaccgacgagtgtcctaccctaaccatcgacagaatcaataactcaactggagggcgttatgcctgacaacaaaaaacaagggcgttcgaacaagactatgacgttcttcgtctgtttcctcgccgcgctggctggcctgctgttcggccttgatatcggtgttattgcgggtgccttaccctttattgccaatgagttccagatttccgcccacacccaggagtgggtggtcagctccatgatgttcggagctgccgtcggcgcggtcggcagcggctggctctctttcaaactgggccggaaaaagagcctgatgatcggcgcaatcctcttcgtcgccggttcgctgttctctgccgccgcgccaaacgtcgagatcctgctggtttcccgtgtgctgctcggcctggcggtgggcgtcgcctcatatacggctccgctgtatctgtcggaaatcgccccagaaaaaattcgcggcagtatgatttccatgtaccagctgatgatcaccatcgggatccttggcgcctatctctctgacaccgctttcagctacagcggcgcatggcgctggatgctcggggttatcatcattccggcggtattgctgctgatcggcgttatcttcctgccggacagcccgcgctggttcgccgccaaacgtcgctttgtcgatgcggaacgcgtgctgctgcgcctgcgcgatactagcgccgaagcgaaacgcgagctcgatgaaatccgtgaaagcctgaaggtaaaacagtccggctggtcgctgtttaaagacaacagcaacttccgccgcgcggtgttcctcggcatcctgctgcaggtgatgcaacagttcaccgggatgaacgtcatcatgtactacgcgccgaagatttttgagctggcgggttatgccaacaccactgagcaaatgtgggggacagtgatcgtcggtctgactaacgtgctggccacctttatcgccatcggtctggtcgaccgctggggccgtaaaccgacgctgatccttggctttatcgtgatggccgcgggtatgggcgtcctgggtaccatgatgcacatcggcattcactcctctaccgcgcagtacatcgccgtcctgatgctgctgatgttcatcgtcggtttcgccatgagcgccggcccgctgatttgggtactgtgctccgaaatccagccgctgaaaggccgcgacttcggtatcacctgctccacagcgaccaactggattgccaacatgattgtcggcgccaccttcctgaccatgctcaactcgctgggcagcgccaataccttctgggtgtacggcggtctgaacgtgctgtttatcctgctgacgctgtggctgatcccggaaaccaaaaacgtctcgctggaacatattgaacgtaacctgatgcagggtcgtccactgcgcgagatcggtgcccgcgattaaccttcctgagcttcctcccatcccgggaggaagcttcctcttgctctccccctccgccgcactatcctctggcgctatgaaaacgccccgtattcccatcgctattcagcaggccgtcatgcgcagcctgcgggagcatctcgccaatgcgaatcgcaagctggaacgccgctatgcggaaccgacgctggtctaccagcagcgtggtacttccgctggcaccgcctggctggagaaaaacgaaattcgtttaaacccggtgctgctgctggaaaatcagcgggagtttatcgatgaagtggtgccgcatgagctggcgcacctgctggtctggcagcatttcggccgcgtcgcgccgcacgggaaagagtggaaatggatgatggagagcgtccttggcgttcccgcgcgtcgcacccaccgctttgaactcgcttcggtccgccagaacaccttcccctatcgctgtcgctgtcagcagcaccagctcaccgtccgtcgccataaccgggtggtacgcggcgaggccacctaccgctgcgttcgctgcggcgatctgctggtggctgaaaaataaccatcggaattaattagaaactttctgatctgactgattgcatccggcaccctcattcgctacgttgcgggctcgttttgacacggagttaacgatgtcccgtatgcatgttttagccgtagcggtattgagcgcggcagtcagtggtccgcttgcggccgctggtattaatagtttttcccaggccaaagccgctggcgtcaaagtgaatgccgacgttccgggcgatttttattgcggctgtaaaatcgactggcaggggaaaaaaggcgttatcgatttggaatcctgcggctataaagtgcgtaaaaatgagaaccgcgccagccgggttgaatgggagcacgtagtgccggcatggcagttcggccatcagcgtcagtgctggcaggagggtggacgtaaaaactgcgccaaagatccggaataccgcaagatggaaagcgatatgcacaacctgcagccggcggtgggagaagtgaatggcgatcgcggcaactttatgtacagccagtggaacggcggtgaaggccagtacggccagtgcaccatgaaggtcgattttaaagataaaatcgccgagccccctgcccgcgctcgcggcgccatcgcccgcacctacttctatatgcgcgaccgctatcagctgaatctttcccgccagcaaactcagctgtttaccgcctggaataaacagtacccggtcaccgcctgggaatgtgaacgtgatgagcgcatcgcgaaagtgcagggcaaccataatccgtatgtccagcaggcttgccaggcgcaaaagagctaacctacactagcggcaattgttaatttgcagccctgtgcttcccgcccgatggcgggaagctggcatctgcgcaacgaacggaatatcaagcatgcgcattcctcgcatccatcatccagaacgcctcattgtcggcagccagatcgcgctgagcgatgacgcggccaaccacgtcggccgcgtcctgcgcatgaccgccggtcagcacctacagctttttgacggcagtaaccaggtgtttgacgcggtcatcaccgaggccggtaagaaaaacgttacggttgaggtgctcagtggcgaacctgacgatcgggaatcgccgctgcatatccatttaggccaggtgatgtcccgcggcgaaaaaatggaattcaccatccagaaatcgatcgaactcggggtaagcctcataacgccactgttttccgagcgctgcggcgttaaactggatgccgaacgtttgcagaaaaagatccagcagtggcagaaaatcgctattgccgcctgcgaacagagcggtcgtaacgtggtaccggaaatacgtccggcgatgcagctggaggcgtggtgcgccgagcaggacagcgggctgaagctcaacctgcacccgcgcgccagcgccagcattaacacgctgccgctgccggttgaacgcgtccgtctgctgattggcccggaaggcgggctgtcggctgaagagatagcgatgaccgcgcaataccagtttactgatatcctgttgggaccgcgcgttctgcgtacagagactactgcgctcaccgccatcaccgccctacaggtgcgttttggcgacttaggttgaggcgttaacggagaagaaccatgatcaagctcggcatcgtgatggatcccatcgcaaccatcaacatcaagaaagacaccagcttcgctatgttgctggaggcgcagcgtcgcggctatgaactccattatatggagatgaacgacctctatttgatcaacggcgaagcccgcgcccggacgcgcacgctgagcgtcgaacagaactacgataaatggtatgacttcaccggcgagcaggatctgccgctggcggaccttgacgtcatcctgatgcgtaaggatccgccgtttgataccgaatttatttatgccacctacatcctggagcgagcggaagagaaaggcacgcttatcgtcaacaagccgcagagtctgcgcgactgtaacgagaagctgttcaccgcctggttctctgaactgaccccggaaacgttggtcacccgcaataaagcccagctgaaagccttctgggaaaagcacggcgatatcatcatgaaaccgctcgacggcatgggcggcgcctctattttccgtgttaaagccggcgatccaaaccttggggtgattgccgagacgctgaccgaactgggcagccgctactgcatggcgcagaactatctgccggccattaaagatggcgacaagcgcgtgttggtagtggatggagagcccgtgccttactgcctggcgcgaattccgcagggtggcgagacccgcggcaatctggccgccggcggccgcggcgaagcccgcccgttgaccgaaagcgactgggaaatcgcccgccgcgtcggcccgacgctgaaggccaaaggccttatcttcgtcggcctggatatcatcggcgaccgtctgacggaaattaacgtcaccagccccacctgcgtacgcgaaatcgaagccgccttcccggatatttcgatcaccggtatgctgatggacgctatcgaaagacgtatcgataaataagcacgacggcggaccaacgtccgcttttggcgcagcgagcgcggattaccgcgctcgtgaaacgttgccagcctgacgccactcgggcgccagccagataaagtgcatcgacaccattctactttgcccgcatactgggtgttgcttttttgaaccaggaacgaacctctgacaatgaatttacagcatcactttctgattgccatgcccgcgcttcaggaccccattttccgccgctccgtagtctatatctgcgagtacaacgacgagggtgccatgggcattattatcaataagccgctggaaaatctgcaggtggaagggatccttgagaagctcaaaattgtcccggagccgcgcaatccagagatccgtctggataaaccggtgatgctgggaggcccgctggcggaagaccgcggcttcattttgcataccccgccctctgacttttcctcgagcattcgcatctcggataacacggtgattaccacctcgcgggatgttcttgaaaccttaggaaccgatcggcagccgggcaacgtgctggttgcgttgggctactcttcgtgggagaaagggcagctggagcaggagattttagataatgcctggctcaccgccccggcggatcagaatattcttttccgtacgccgatcgccgatcgctggcgcgaggcggctaaactgattggtatcgacattgtgacgatgccaggcgtcgcggggcatgcgtgatgagcggaacctttctcggctttgactttggcaccaaaagcatcggcgtggcggtgggacaacgcatcaccgcgaccgcacgaccattaccggcgctgaaggcgcaggatggtaaaccggactggaacgtcatcgaaaaactgcttaaagagtggcagcctgaggcggtaatcgtcggcctgccgctcaatatggacggcaccgagcaaccgctgacggcgcgcgcgcgtaatttcgccaataaaattcatggccgctttggcgtcgcgatccttctccacgatgaacggctgagtacggttgaggcccgcgcgggcctgtttgaacacggcggctaccgggcgctgaataaaggcagcgtcgattcagcctctgccgtagtcatactggaaagctacttcgagcagagcttttaaactctgccctcctgcgccgccggcggaccgctgacggcgcacgtttacccgcttagtggcgcagatgttcgttagcccagctcaccgcctgggtgcgatttttcacgctcagtttacgaaacacattgtacaggtgcgtccgcaccgtgttctcgctgataaacagcgcgcgggcgatatccaggttcgttgcgccgcagcgcagttcgttgaggatctcgcattcccgctcggtcagcggcgagttctctactggagtcgatgcatggtccgcagcgtacatcgccgggtgcatcacgctcaattcagccgtctgctcgccgttcagcacggccttaacgccctcaattaagcgcgattcatcatcgtcatgacggaacacgccatataaagccggccactgcgccatttcgtatagctcatacttttgtgcgctattaataatcaacaaacgaggattatctgcctgcaggcgaataatatcccgccacaccccgtttaatttcttatttgacactgcaatatcaaataatattacagaatcttttgccaaacgctgcgccagcggtttattaatattttgtaaaaccacctgtgccatcagggtttcgctcagatagctggcaaaggctttgctttgaatagacgggtgggtaataaaggttacctgacgagaagatgatgaatttccatttaaattaatcacttaaaactctccttagctgttacccaccgccatggtggttaaatgaataaaaaaagatacaaacagtcgtgaatttataaatcaccaaggtaatttacaaactgaaacgttattccatgagaatcatcctattcccacaaacagcataaatcgaatgactcaaagctgtcaaaagataatcaaacttttttcctggaaatgcgtattcactgtcgacatatctaatctgaatgtgttatttgaatttataatcaaaagttatttgtattaccaaataatattaataaacaacaaataaacattcatctaacatatcatttaacctgtcatatcaatctctttctcatcttatagcgcgcctgcagcgacacgttgctgaaaactctgggtaaaggtcaacattccggcctgcatcccggtctgcatcacaccaggcaattgatgtacttttccttcacggatcaaattcgccaccgctggcgtgttgaccagaagctcgtatagcgcaactctcccgccctgacgtgcaggtaacaatttttgcgccagcaccgcgcacaggcttccggcaagctggctacgaacctgatctttctcctccgccggaaagacatcgatcaatctctccaccgccggcgccgcgccgcgggtatgtaatgtcgccattaccaggtgcccggtctccgccgcggttaacgccaggcgaatggtttcgctgtcgcgtagctctccgagcaggatcacatccggatcctggcgcagcgccacgcggagcgccgcggcgaacgaaggacagtgacggccaacttcccgctgctggatcagacagcgctcgctgtgatgaataaattccaccggatcttcaagcgtcagaatatggccatcaagatgctgattgaggtgccccaccattgccgccagggtggtcgacttgccgctgcccgtcgctccggtgaccaacagcaaaccactctcttccgccagcagttcgctcagcgcaggcggggcgccgagcatatccagacgcgggcactgttcaggaaggaggcgcagcaccagcgatatcccacgcgtatgggcgaaggcgctggcgcgcagccgcgcaccgcaggccaggttcagcgcaaagtcaatctggccgtgttcctgccagtgcagtaactgtgcggcatcgagccagtcgttgagtaaattcgcaatatccggcgcgggaaagggcgcgggctccagcctgccctgccgccgccagcgcggtgcggcggaattgcacaggtgtagatcggagacattatgctttacactaagggctacgatttcttccagcttcataactcatcctcggaatatgaacgatattgcgcataacctggcacaggtccgggacaaaatctccggtgctgccgcccgatgcgggcgtgcgccagaagaagtgacattgcttgcagtgagtaaaacgaaacctgcgagcgcgatcgaagaagccattgcggcaggccagcgggcatttggtgaaaactacgtccaggagggcgtggagaagattaaccatttccagcaggctggcgtcagcgggctgcagtggcactttattggccccctgcagtccaacaaaagccggttggtggcagagcattttgactggtgccacaccgtcgatcggctgaaaatcgccacccgcctgaacgagcagcgcccggcgcatttaccgccgctgaaggtgctgattcaaattaacatcagcgatgagcagagcaaatccggcatcccgctggaagcgctcgacggcttagcggcggagatcgctgagttacctcatctggaactgcgcggcctgatggccattcccgcgcctgagtcagaatatgtaaggcagtttgccgtcgcccggcaaatggcggtagcatttgcgcgattaaaaacgcggtaccccacggtcgatacgttgtctctgggaatgtcggacgatatggaagccgcaatcgcggcgggaagcacgatggtgcgcatcggtactgccatttttggtgcgcgcgactacagcaaataataaggaatctgaggaacgccatgaagacgttgactttcctgctttcaacggtcattgagctttacacgatggtcgtgttgttacgcgtctggatgcagtgggcgcgctgcgacttttacaacccgttttcgcagtttgtggtgaaagccacgcagccgattgtcggaccgctgcgccggattatcccggcaatggggccgattgacagcgcctcgctgctggtggcatttattctctgcgtcatcaaagcgatcgtgctgtttatggtgatcaccttccagccgatcatctggatctccgctctgcttattctgctgaaaaccatcggctcgttgatcttctgggtactgctgttgatggcgatcatgagctgggtcagccagggccgtagcccggtggagtatgtgctgatgcagctggcggacccgctgctgcgccctatccgcaacctgctgccgtcgatgggcggtatcgatttctcgccgatggtgctggtattgctgttgtacgtaatcaatatgggcatcgccgaagtgctgcaggccaccggtaatgtactgctgccggggctgtggatggcgctatgagtgccgttgaaacctgcgctgacgggctggtgctgaggctgtacattcagcctaaggccagccgcgatagcatcgtgggcgtacatggcgacgagcttaaagtcgccattaccgccccgcccgttgatggccaggccaatgcccacctggtgaaatttctcgccaaacagttccgcgtcgccaaaagccaggtactgattgaaaaaggtgagctgggccgccataagcaagttaaaatcatcgccccacaacagatcccgactgcggtcgcggcgctaactgaataaacaggattcatcatgcaaaaagtcgtcctcgctaccggcaacgccggcaaagtgcgcgaactggcctcgctgctggaagattttggtctcgatatcgtcgctcagaccgagcttggcgtggactctgcggaagagaccggcctgaccttcattgaaaacgcgattctgaaagcgcgccacgcggcgcagatcaccggcctgccggccatcgccgacgattccggtctggccgtcgatgctcttggcggcgcgccgggtatttactccgcacgctattccggcgtcgatgccagcgaccagcagaatcttgagaagctgctcgacgcgttaaaagacgtgccggacgaccagcgtcaggcccagttccactgcgtgctggtctatctgcgccatgccgaggatcccacgccgctggtgtgccacggcagctggcctggggtaatcacccgacaagccgccggtcatggcggcttcggttacgacccgatcttcttcgtcccgtcagaagggaaaaccgcggccgaactgagccgtgaagaaaagagcgccatttcccatcgcgggcaggcgctgaaactgttactggaagcattacgtaatggctaatttgccgccgctgagtctctatatccatattccctggtgcgtgcagaaatgcccgtactgtgattttaattcgcatgcgctgaaaggcgaggtgccgcatgatgactacgtccagcatctgctgaacgatctgcaggctgatgcgcactatgcccagggacgggaaataggcactatttttatcggcggcggaacgccgagcctgctgtccggcccggccatgcaaacccttctggatggcgtccgcgcctgcctgccgctggccgccggggcggaaatcaccatggaagccaacccgggtaccgtggaggccgatcgcttcgttgattatcagcgcgccggggtgaaccgcatctccatcggcgtacaaagctttagcgaaccgaagctgcagcgcctggggcggatccacggcccggaggaagccaagcgcgcagcacgtctcgccagcggcctcggcttgcgcagcttcaacctcgacctgatgcacggtctgccggaccagtcgctggaggaggcgctggacgatctgcgtcaggcgattgccctcaacccgccgcacctgtcgtggtaccagctgaccattgagccgaacaccttgttcggctcccggccgccggtgctgccggatgacgacgcgctatgggatattttcgagcaggggcatcagctgctgagcgccgccggctatcagcagtacgagacgtccgcctatgctaagccaggcttccagtgtcagcataatctcaactactggcgctttggcgactacctcggcatcggctgcggcgcgcacggcaagatcaccttccctgacggacgcattctgcgaaccgccaaaacccgccacccgcgcgggtatatggaaggccgttaccttgagcgtcagcatgatgtggaagaagcggataaaccgtttgagttctttatgaaccgttttcgcctgctggaggccgcgccgcgcgcggagttcagcttgtataccggccttgatgagcaggttatccgtcagcaaatcgatgccgctatcgccgaaggctatctgctggaagatgcgcaaaactggcaaattaccgagcacggtaaactgtttttaaattcgctgctggagctgttcctcagcgaagagtaatccctgcgggcggcacgtcgtcgcccgtatctttccccttacatcctctcccgctacggtcaaatcgactggcgtttttttgttcacttatttgcagcgaatcacaaaatccgatcgacttttttccttttcttgactcattttttgcgcagtggtaatcctgcttcatcggttgagcaaatgtaaaaccgacgtatcctacatgtgaattattggtaactctgattaaaaaagtctctgtaacgtcggcgcaacccggcgggcttaagcctataaaaaagagggtaacacaatgaattaccgtaatatttttatcacactcgccgcactatccggcaccgtcacggcttcagcctggtctgcagagtccgccaccgtggcctttttaatgcccgatcaggcctctacccgctatgaacagcacgacttccccggttttaaggcggaaatgagcaagctttgcgcggattgtaaggtcatctatcagaatgccaacgccaacgcgtcgctccagcagcagcagttcaactcggttatcgcccagggggcgaaagtgatcgtcctggatccggttgattcttccgccgccgccgcgctggtcgaaaacgcccaagcgcagggggtcaaggtcattgcctatgatcgcccggtaccagacaaaccggctgatttctacgtctcatttgataacgagggcattggctacgccatcgcaaaatctcttaccgaccatctgaaagcgagcggcgtgccgcaggatgccggcgtgctgcaaattaacggttcgccaaccgatgccgccgcagggctgatccgcgacggtatccatcgcggattgaaagagtccggttacaaaacgttggccgaattcgacaccccggagtgggcgccgccgaaagcccaggagtggaccgccgggcaggttacccgctttggcgacaaaattaagggcgtggtcgcggcaaacgacggtaccggcggcggcgcaattgccgcctttaaggctgccggcgtccagccgctgccgccggtcaccggcaatgacgccactatcgccgcgctgcagctgatcatcgctggcgatcagtacaacaccatctccaagccatcggagatcgtcgccgcggcggcggccaaagtggcggttgattttatccagggcaaaaaaccgcaggccagcaccaccctgtacaacaccccttcccagctatttaccccggaagtggtgacggccaaaaacatcaaagcggaaatcttcgataaaaaaatccagacctgggatcaggtgtgtagcggcgagtacgccgccgcctgccagaagttaggcatcagcaagtaacttttgcccctgcgcccgccgcggcgggcgcgatttcgccattattgaggtcgttttgtatgccgcaacaacaacacaactccgccgccgggcggccaatactgcaactgcgcaacgtctctaaacattttggcgcggtgtccgcgctgacggatatcgaattagaagtccacgccggcgaggtggtcgcgctggtcggcgacaacggcgcgggcaaatccacgctggtgaagatcctcgccggcgtccaccagccgacctccggcaccattgagtttgacggcaaccctgtcaccctcgatagccccggcaaggcgctggaatacggtattgccacggtgtttcaggatctggcgctgtgtgaaaaccttgatgtggtggcaaacctgtttctgggtcatgaaatttcgccgttccagctcgatgaagtggcgatggaagtgaaagcctggacgctgctgcaggagctggcggcacgtattccgtcggtacgcgaaccggtggcatcgctttccggcggccagcggcagaccgtcgccatcgcccgttcgctgctgctgaaccctaaaatcattatgctcgatgaacccaccgcggcgctgggcgtcgcgcagaccgcggaagtgctcaacctgattgagcgcgttcgcgagcgcgggcttggcgtcatcatcatcagtcacaacatggaagacgttcgcgccgtcgccgaccgtatcgtggtgctgcgtctcgggcgcaacaaagggatcttcacgcccgatgcttctaatcaggatctggtcgccgcgatcaccggcgcgacggaaaacgccgtctcacgccgggttgaacgtaaatcacagccaacgacttccggagcgatgtaattttatgaacagtaagaccgcatcccacaccgcgctggatcgcagcgatgagcgcgttcgtcacgacgaggggctgttcggcgccctacgcgcgcagataacccgcatcaaaaccggcgatctcggcaccgcgccggtgatagccgggctgattgtgatttccctggttttcaccttcctcaacccggtctatatcgcgccgaataacctggtgaacctgctgtttgactgcgcgacggtcgggtttatctcgctcggcatcgtctgcgtgctaatgcttggtgagatagacctgtcggtcggctccatgagcggcctggcatcggctatcgtcggcgtgctgtgggtgaacgcaggatggccgctggcgggagccatcgccgtggcgctggcctgcggcgtggccgtcgggttggtctatgcgctgctgtatacccgcgtcggaatgccgagtttcgtcgccactctcgccggcctgctggcgctgctgggtatgcagctgtatatcctcgggccgagcggcagcatcaacctgccctatacttcgccgctggtgcgctttggccaactgctggtgatgcccggctggttctcacacctgatggcattgctgccagggctggcgatccttatttttggcctgaaaaaacgctcgcggcgcctggcggccaatctttccgccgagggagtcagctcgctagtggcgcgcgcgatcgcgctgacgattatcttcgaggccgcggtgctttacctcaatcaggggcgcggtattccatggattttcggtctctttgtcgcctgcgtgatgatcctcagctacgcgctgaaacggacaaaatggggtcgctcgatgttcgcggttggcggcaaccgtgaagcggcgcgccgttcgggcattaacgtgcgggcgatttatgtgagcgctttcgtcctgtgtaccacgcttgcgaccttcggcggcattctcgcggcgtcgcgactggcttccgccagccagcaggccggcaccggcgacgtcaacctcaacgccatcgccgcggcggtgatcggcggcaccagcctgttcggcggacgcggcagcgcctggtccgcgctattggggatcatcgtgattcagtcgatttcaaatgggctgacgctgttgaacctgccgtcttcgctgcgctatatcattaccggcgcggtactggcgattgcggtaatcattgattctctggctcgccgttcacgcgtgtcgcacggccgcgcctgagtggagaagtgcgcggcccaaaggtatgcgggccgcgaaattttgattattttaacgagccaaccagcgctttgcggctgtcctccagcgatacctcccggctgcaaacatctttgccgaactgctggaaatcggcctcctggtttttccattcctcctgaatcgccgtttgcaggccgccgaggctgccgagaatgccctgtagcggattaccgccgcctttgagcaccgctttcgcccccatctcgttaatgctgtcctgcagaatgccgcccatcgcctgattcaccagctgctggccatcggcgcgtacctggtcgatagctttatagtggaaggtcaggccatcgctgcgacgttcgataatgcggttcatctgttctttcagctgcgcgtccagtttggtcaggcgaccgtgcatgctgctgttggcgccaacctgttcggtaatgattttatccagcgccttgcggcttttttcgactcgcgaccgcgcgccttggtcaatccacggcaggctgctgcgcaggctggcctgataatcctgcgcctgttcgcgctgggcggcgctgagcgcataggccttgccgttaaaggtcagattgccgtccggctttatcaccagatcgccgttttcccctttcacctgcacctgctgcgggctgaggatcacatcgtcacgcggcgtgacgctacactggtagtccgcatgggcagacaaagcggtgatggagagcgccaccgccagcagcgttttacgcatcataaaactcccttaagacaaaacgggccggcaattgccgacccttgtcaaacttagtcccaccagacgtcaaaaagttcgctggtgcgcacatcctctaacttacgcgcttccagccatttgcgtacgatagcctgatgctcttcagtgcacttaccaatctcctgcatgcagatgagcccttcccaggagagataaccgctgccgtcgaaggccagcttgttcggctctatcacctcttcgatcagatcgttgaccgtctggtcgatctgctcttcgctggtcccttccgggaaacgccaggcgacggagaagcctaactcctgaaactcatcgatatgcatttttttacgcagacgacggctacgattcttggccattatttcaccctctcgaacattaagtcccatacgccgtggccgagacgatggccacgctgttcaaatttggttaccgggcgcgattccgggcgcggtacgtaatcgttgcttgccgactggttacgatagccttccagcgaggacatgacttccagcatatgcacggcataagcttcccagtcggtcgccatatggaagacgccgccgagcttcagcttgcttttcaccagctcagcgaaaggcggctgcacgatacgacgtttattatgacgcgctttatgccacggatcagggaaaaacagttgcaccatattcagcgagttatccgggatcatggtatgcagcacttccaccgcatcgtgacacattacgcgcaggttttgtacgccttcttcttccgcggaagccagacaagcgccaacgcccggggagtgtacttcaatgccgaggaaattctgttccggtttggctttcgccatcgccaccagcgaggcgcccatcccgaagccaatttctaaggtgaccggcgcgtcacggccaaacagggcggcgaaatcgagcggcgcatcgttgaattcaacgcccatcaccggccaaatgttatccagcgcatgctgctgccctttcgtcaggcggccctggcgacggacgaagctacgaatacggcgcagcgggcgaccgttttcatcgaattccggagagatgacgtcgtttttcataaaagtttggtctgcttgtgaatgtgttcggaaaacgggcattatccaaagttacccggcggatgcaagggtttacagccactcgcccttatgctgcaatctgcccccctgtaatcgcgatcccggagccgtagctttgacttttctcgccacgcaattttcagcccaggttctggactggtacgacaaatacgggcgtaaaaccctgccctggcaaatcgccaagacgccctacaaagtatggctctccgaagtgatgttgcaacaaacccaggtgaccacggtaatcccctattttgaacgctttatggcgcgtttccccacggtggttgatttagccaacgcgccgctggatgaggtgctgcatctgtggaccggtctgggctactacgcgcgggcgcgcaacttacataaagccgcacagcaagtcgccacactgcacggcggggaattcccccggacctttgacgaagtggcggcgctgcccggcgtcgggcgctcaacggcgggggcgattttatccctttcgctcggtcagcattatccgattctcgacggcaacgtgaagcgcgtgctcgcccgctgctatgctgtcagcggctggccggggaaaaaagaggtggaaaaacggctgtgggacatcagcgaagaggtcaccccggcagagggcgtcgagcgcttcaaccaggcgatgatggatctcggggcaatggtttgcacccgctcgaagccgaagtgcgagctgtgtccgctgagcaacggctgcgtggcctacgcgaaccattcatgggcggaatatccgggcaaaaaaccgaagcagaccctcccggaacgcaccggctacttcctgctgatgcagcacggcgacgaggtgtttctttcccagcgtccgccggtgggtctgtggggcgggttgttctgttttccgcagtttgcagacgaagcggagctacgcgagtggctggcgcagcgccagataaaggccgataatctgacgcaattaaccgcttttcgccacactttcagccatttccacctggatattgtgccgatgtggcttacagtgcactcatctggcgcatgcatggatgaaggcaacgcactctggtataacttagcgcagccgccgtcggtcggtctggcggcccccgtggagcgcttgttgcaacagctaaaagccggagcgccggtataaatttttcggctatcaaagaggattaattatgagcagaaccattttttgtaccttcctgcagcgtgaagcggacggccaggatttccagctgtatccgggcgagctcggaaagcgtatttacaacgaaatctccaaagaagcctgggcgcagtggcagcacaagcagaccatgctgatcaacgagaaaaagctcagcatgatgaacccggagcaccgcaaactgcttgagcaggagatggtgcagttcctgtttgaagggaaagacgtgcacatcgaaggctacacgccgccggaaaaacagtaagggccctgcggcctttaaaaaaacaaacacaacacgcacgcccggaatgatgaaaaaatacttagcgctcgcgctgattgcgccgttgctcgtttcgtgttccagctccaataaaaaaggcgccgaatacaacgaggcctgggtcaaggacacgaacggattcgatattttgatgggccagttcgcccacaacatcgagaacatttgggggtacaacgaagtcctgctcgccgggccaaaggactacgtcaagtacaccgaccagtatcaaacccgcagccacatcaacttcgatgaagggacgatcaccgtcgagaccattgccggcaccgaccctcgcggacgactgcgccaggcgatcgtcaaaaccctgttgatgggcgatgaccccaactccattgacctctattccgatgtcgatgacatccagatctccaaagagccgttcctctatggccaggtggtggataacaccggggcgtcgattcgctgggagtggcgcgccgcgcgctttgccgactatctgctgcaaacccgtctgaagagccgcaacaacggcctgcgcgtggtctacagcatcaccattaacctggtgccgaaccacctcgacaaacgtgcgcataaatacctcggcatggtgcgtcaggcctcgcgtaagtatggggttgatgagtcgctgatcctcgcgattatgcagaccgaatcctcctttaacccctatgcggtcagccatgccgacgccatggggctgatgcaggtggtccagcacagcgccggcagagacgtcttccgctcccagggtaaatccggcctgccaagccgcagctatctgtttgacccggcgaataacatcgacaccggtaccgcctacctggcgatgctgaacaatgtttacctcgccggcatcgataaccccacctcgcgtcgctacgcggtgatcactgcctataacggcggcgccggcagcgtactgcgggtcttctccagcgataaagtgcaggcggccaatattatcaacagcatggcgccaggggacgtctaccagacgctgaccacccgccatccgtcggcggaatcgcgccgctatctgtacaaagttaatacggcgcagaaaagctaccgccgtaaatagccctcctcccgactccggcctcagccccgcgctgaggccgcgcttattctccgccatactctgtaatatctttcggttttctgcggcagttaacagaagcattaagctagtgaatgatagaatcgcatcaaaataacgggattaatgttattttaaaaacataacaagcccacatttgtgaggataactacatgaatcttaagctgcagctcaaaatactgtcgttcctgcagttctgcctttgggggagctggctcaccacgcttggctcgtacatgtttgtcacgctgaagtttgacggcgcggcaatcggcgcagtgtatagctcgctcggtatcgccgcggtgttgatgccgacgctgctcggcatcgtcgccgataagtggatcagcgccaaatgggtatacgccatctgccacctggtcggcgcgttaacgctgtacctcgcggcgcaggtcaccacgccgggcgagatgttcctcgtgatcctgcttaactcgctggcctatatgccgacgcttggcttgatcaataccatctcctactaccgcctgcagtcggcggggctggatattgtcaccgatttcccgccaattcgtatctggggcaccatcggctttatcctcgccatgtggggcgtgagcttctccggctttgaactgagccatatgcagctgtacattggcgcgacgctgtcggtcctgctgactctgttcaccctgacgctgccgcatattccggtcgccaacgcccagcgcaatcaaagctggacggagatgctcggcctgaacgcttttgcgctgtttaaaaacaagcgtatggctatcttctttatcttctcgatgatgctcggcgccgagctgcaaatcactaacatgttcggtaacaccttcctgcacagcttcgataaagatccgctgtttgccggcagctttatcgtcgagcacgcgtcagtgctgatgtcgatttcgcagatttccgaaacgctgtttatcctgaccatcccattcttccttagccgctacggcattaagaacgtgatgcttatcagtattgtggcgtggatgctgcgcttcggcctgttcgcctttggcgacccgacgccgttcggcactgtactgctggtgctgtcgatgatcgtctacggctgcgccttcgacttctttaacatctccggttcggtgttcgttgagaaagaggtgcgcccggaaatccgcgccagcgctcaggggatgttcctgatgatgaccaacggcttcggctgtattctcggcgggatggtgagcggcaaagtcgtcgaacactttaccgtcgaggggatcactgactggcagagcgtgtggctgattttcgccggctattcgctggtgctggcctttgccttcgtggcgctgttcaaatacaaacacgtcagacaaccgaccgccgcccagcagagcgtgtgatcggcaaaagtaaaacgccccgcctgttcggcggggcgtttttttatcccttcagcacgtagccatacagccgcttaatgccgtccggatccgtctcgctgtaaaccccctgcagctccggcgagaagccaggcagcatattgaccccctcctccagcgcgaggaaatagcgcagcacggcaccgccccagacctcgccgggcaccacgcacagcacgcccggcggatacggcagcgccccctccgccgcgacgcggccttccgcctcgctcagacgcaccagctcaacgttgccgcgaataaactcgtggttggcatcctggggattcatcaccacccttgggaagctccgtttacggaacatctctttttgcaggctcttcacgtcaaagctaacgtacagatcgtgcatctcctggcacagctcgcgcagggtatagtcgcgataacgcaccggatatttgttatagatggtcggcaacacatcggccagcggcgtatccgcttcaatatgctgttcaaactgccccagcatcgccaccagctgcgccattttttcggcgctctccgccggcgtcagcaggaacagaatcgagttgagatcgcacttctccggcacgatgccgttttcacgcagataatgcgccagaatggttgccgggatgccaaactcactgtactccccactttcagcgtcaatgcccggggtggtcagcaacagtttgcacgggtcgacaaaatactggtcgtccgcgtagccttcaaaaccatgccagcgcgcgtcgggttcgaagctgaagaagcggcgctcccgggcgatcgcctcggtcgggtgatcctgccacgggcgccccgccaccatcggcggaataaagggctggatcatcttgcagttggcgatgatcgctttgcgcgcctcaatgcccagcgccacacactcggcccacaggcggcggccgctctcaccttcatgaattttggcgttgacgtccagcgcggcaaacagcggatagaacgggctggtggaggcatgcagcataaaggcgttattcagccgcttgtgcggacagaaacgcgcctggccgcgcagatggttatcctttttatggatctgcgacgtctgtgagaagccggcctgctgcttgtgcacggactgggtgacaaaaatacccggatcgtcgggggtcagctccagcagcagcggcgagcagtcggccatcattgggataaactgctcatagcccacccacgccgagtcgaacaggatgtaatcgcagaggtggccgatcttatccaccacctggcgggcgttatagaccgtgccgtcgtaggtccccagctggatcaccgccagacgaaacgggcgggaggcattggctttctcaggcgccgcttcgcggatgagatcccgcaggtaatgctcatcaaagcagcgctcgtcaatgccgccgataaagccgaacggattgcgcgcggcttccaggtaaacaggcgtcgcccccgcctggatcagcgccccgtgatggtttgacttgtggttgttgcgatcgaacagcaccagatcgccgcgggtcaacagcgcgttggtcacgactttgttggccgccgaggtgccgttgaggacgaagtaggttttatccgcgttgaacaccttcgcagcgaacttctgcgcgtgcttggccgatccttcgtggatcagcagatcgcctaatttcacatcggcgttgcacatgtcggcgcgaaagacattttcgccaaaaaagtcatagaactgacggcctgcagggtgctttttgaaaaacgccccgtgctgatgccccggacaggcaaaggtgctgttatccatctcgacgtactgggtcagggtattgaaaaacggcggcagcagacgcgcttcataatcacaggccgccgcctccagctccagccactcctgatctttaccggcgatcaccgcctgcaccccctccggcttgtcgaccgccgtctcactcagcaggtagaccggcaggttaaatccgctacgcctgaggagagtaaggatgccgctgcgactgtcggccacggagatgacgactgccgccacatcggtaaaatcggtactgtccagcgccacaacgcgacggtgggtggacaagcgggtgaccagctcgcagctggcggcaatgtgcatggatttcataagcgcaaatgcccgtatcgggagtgtaaaaacctcagacaagggagaccttgcccaacgatgtgtccgggtctgacggattcagctccgaccgccggacatcagtaaaagcagacgcgtccgatcttactgttgccctacagtgagcatacgtgtccttcaccgcatggtgaacagaggggtaagcgtagcaagatgaggcagcccgcgcatctgggcgcggcgtcgctggcgagataatggctgtgtcgtcatcggcggcctcatatcagggaggagaaaattcgcgcaatcatggcacctttcccgaacaggcgcaagatgaaaaccgtatgcacttatatcacggatacacaagctttcccggtaagttaacgccataataatgcggttatcagggatttttaacaggagtcagcgtggttacaggaccttttattaacgccagcgcggtgctggtcggcggtgtgctgggcgccttactcagccaacggttgccggaacggatccgcaccgcaatgacctctatttttggcctggcgtcattgggcatcggcattttactggtcattaagtgcgccaatctgccggtgatggtgctgtcgaccctggtggggacgctgctcggcgaaatatgcaatatggaaaaaggcatcaatacgctggtcagtaaactccagcagttgatgtcagcgaaaggcaagaaaaaggcttcggctcatgagtcttatattcagagctatgtggcgattatcgtcctgttctgcgccagcggcaccggcgtcttcggcgccatgcgcgaagggatgaccggcgacgccagcattctgattgccaaagcgtttctcgactttttcaccgccaccatcttcgcctgcaccctgggcattgccgtcgccgccatcagcgtaccgatgctgcttatccagctgactcttgcagcctgcgcggcgatcattatgccgcttaccacgccgatgatgctggcggatttcagcgccgtcggcggcatgctgctggtggccaccgggctgcgcatctgcgggataaaaatgtttgccgtagtgaatatgctgcctgcgctggtgctggcgatgccaatttccgcggcctggacgctgttttttgcctgaagacgcgtgcttttagcgcaatgtggtgatagattgttcagtctgctgtaaaacagataaatttcgttgacgaggcgcggcgattacggtttaatgcgccccgttgcccggatagctcagtcggtagagcaggggattgaaaatccccgtgtccttggttcgattccgagtccgggcaccactatttaaagaacccgcccacaaggcgggtttttgcttttctgcatccggactctccatcgaactgcgttaacccatgatttccctgctgcgtttttctcctggccagcccgctgctagttaacgacaagcgcaggcctattctccatagaatcttttcgcaaatacattttcagatatcagataacgcactgattaaaatcgccattttcccgctaaaagcggctagaaacgcccttttctggaaatcgatccgcccaggtggctgccctgctttccctccagatggccaaatagcatcttatattccattttgcgctaaatgacagagaaatattctttaaataaccgttttcacagttctagcatgcaaaaatatcttaaacgagtgggtaaatggttatgtcactgtttcattccgtgagcgacctgatcggtcatactcccctgctccagttgcacaaactggataccgggccctgcagtctgtttttaaaactcgaaaatcagaaccccggcgggtcaattaaagatcgggttgcgctgtcgatgattaatgaagccgagcgccagggaaaactggcgcccgggggaacgattatcgaagccaccgccggcaataccggcctcggtctggcgctgattgcggcgcagaaaaattaccgcctgatcctggtggtgccggacaaaatgagccgcgagaaaatctttcaccttcgggcgctgggcgcgacggtgctgctcacccgctccgacgtcaataaaggccacccggcctactaccaggattatgcccgccgccttgccgatgaaacgccgggcgccttttatatcgaccagtttaataacgacgccaatccgcaggcccatgccacctccactgcgccggagctttatcagcagctggagggcgacatcgacgccatcgtcgtcggcgtcggctccggcggcacgctgggtgggcttcaggcctggtttgctgagcactcgccgagaacggaatttattctcgccgatccggcgggttccatccttgccgatcaggtcgataccggacgctacggcgaaacgggatcctggctggtcgaagggatcggcgaagattttatcccgccgctggccaggctggagggggtacataccgcgtatcgcgtcagcgaccgcgaagcgttccacaccgcgcgccagctgctgcaggtcgaaggagtgctggccggctcttccaccggcaccctgctcagcgccgcgctgcgctactgccggacgcaaagccgtccgaagcgggtggtgaccttcgcctgcgacagcggcaataaatacctgtccaaaatgttcaacgacgactggatgcgccagcaaggactgatcgcccgccccgaacagggcgatctcagtgattttatcgccctgcgccatgacgaaggcgctaccgtcacggccgcgccggacgacaccctggccgcggtctttacccgcatgcggctgtatgacatctcccaactgccggttctggaggatggccgcgtggtcggcatcgtcgatgagtgggatttgatccgccacgtacagggcgatcgccaacgcttctccctaccggttagcgaagcgatgagtcgccatgttgaaaccctcgataagcatgcgcccgagagcgaactgcaggccattctcgatcgcggtctggtggcggtgatcgctgacaacgcgctttttcttggcctggtcacccgcagcgatgtattgaccgcctggcgtaaccgagtcgcacaataaggaattttttatgtcatctatccacaccctgagtgtacatagcggaaccttcaccgacagccacggcgcagtgatgccgccgatttatgccacctccacttttgctcagccagcgccggggcagcataccggttatgaatattcccgcagcgggaatcccacccgccacgcgctggagacggcgatcgccgacctggaaaacggcacgcgcggctacgcgttcgcctccgggctggccgccatctccaccgtgctggagctgctggataaggacagtcacctggtggcggtcgatgatgtgtatggcggcacttaccgcctgctggaaaacgttcgccgccgtagcgcgggtctgcaggtgagctgggtgaaacccgacgacctggcgggaattgaagcggcgatccgccccgacacccgcatgatctgggtggaaacgcccaccaacccgctgctgaagctcgcggatctcagcgccatcgccgccatcgcgcgccgccataacctgatcagcgtcgccgataacacctttgcttcgccggcgatccatcgcccgctggagcatgggtttgatattgtggtgcactccgcgaccaagtacctcaacggccattccgatgtcgtcgccggcctggcggtggttggcgataactccgggctcgcggaaaagcttggctatctgcagaatgcggtaggcggcgtgcttgacccgttcagcagcttcctgacgctgcgcggcatccgtaccctggcgctgcggatggagcgccacagcgcgaacgcgctgcagctcgccgaatggctggaacagcagccggaagtggagcgagtctggtttccctggctggcctcgcacccgcatcatcagctggcgcgccagcaaatggccctgcccggcggcatgatttcggtggtggtgaagggcgatgaaggttacgccgagcgcatcatcagcaagctgcgctggtttacgcttgcggagagcctgggcggcgtggagagtctggtgagccagcccttcagcatgacccatgcctcgatcccgctggagaaacgcctggcgaacggtatcacaccgcagctgatccgcctgtcggtggggatcgaagatcccaacgatctgattgccgactggcagcaggcgctgcgggcggagtgattattccgacgcgcggatcgttgtcagcgcgtcggccattccctgctgaaggtgggcgataaactgcgtcagcttcggcaggggccgacgatcctggcgccagagcagatgcacaggccgcggctgcggagtccacgcctccagcacgcgcaccaggctgccgctggccagcgcatcggccagcagtacctccggctgcatcagcagcccggccccggcgatcgccgcctggcgcagcgcgtagccatcgttgcagcgcaaaaccgcatcgcgtttccagcgcacttctccctctacgcccggcagccgccactcgttgcgggcggtccagaccgtatgggacaggcagagatgatcggtgagatcttccggcgtcccgggcgttccgtaacgcgccagataagccggcgcggcgcagatcaccatccgatacggcgccaggtagcgagccaccagatcctcctgatggatctcgccgatacggatcgccagatcgaccccctcatccaccagatcgaccatccggttagtcagatccagttccacccggaccgcaggccaggcctgcaggaaggtggcggtcaggggcgcgatcacgctggcgccgaacgaggtgggagcgctcacccgcagggtgccggccggcgccagccgcagccgctcgaccgcgctttcggcgatggagacctgctccatcacccgtttcgcttcgtcaaaatagactcgcccggcgtcggtgaggctctggcgtcgggtgttacgctccagcagacgcgtcgccagcaggctttccaactgggcgatatatttcccaaccatcaccgccgacagccccaggcgcgacgccgccccggtaaagctgccgcactccaccacggcaataaacgtctccatccctcgtaatttgtccatattgctaacctctggttagtaatgttctaacttttagccagtttatccgagattacttttattaaaaaatagcctctcacctcatcaggagtctgccatgaaaattatcgttatcggtgccagcggcaccatcggtcgcgcggtcagcgaagaactgagtcagagacatgaggttatccgcgtcggccgcacccggggagattatcaggtggatatcacctcgcaggagagcgtcgaggcgctatttgcccaaacgggtgaagtagatgccatcgtctccaccaccggcaatctgcactttgggccgttaagcaccatgaccgacagccagttcaacctcggactgcaggacaagctgctgggacaaattcgcctggcgctggtcggccagcattttctgcgcgacgggggggcgattaccctggtcagcggtattgtcgcgcaggaacccattgctcagggggtcaatgccacgacggtcaacgccggtctggaaggctttgtccgcgccgccgcctgcgaactgccgcgcgggatccgcatcaatctcatcagccccaccgtgctcagcgagtcgctggcggcctacggcgactttttcccgggcttccccagcgttcccgccgccgccgtggcgcaggcctatcgccgcagcattgaaggcgttcagaccggccgcatctacccggtcggctactagcctgtgccggcccgccggggccggcgcttacatcaggccgtcgttgcaggtacactgacggctgattgtctccggccgaaaaactgatgttgaaaaaattatccttaattatcccgctactggcgcttatcgcgctgctggtctggtggttcaccccgcattacaccgaggaagatgaagcttactaccgggcggtattttgcataatcgatcatgacgacagccgccagttcctccacgatatgcagaatatcgtcgaggggggaaattctgactacgcgctgcataaaacccattaccttccggcgctggggcagcggatgctggatacctggcgccagctcagcccgcaggaacagcaggcgctgcgtcaggacaagcagcgctgcggcgagatattgcgcgaaaaacaacaggggaaatcatcctgacgagttggcaaaattgcagcatatcgccagcgtcgaataagattgtgctgttgatgaccggatcgctgtcacaaaatatccggtcgtcgtcgcgtcacagtacgacgttttttctgcggcggaatacgataaaaagtagttgatctggtacgaactaactcttattttgcttcacagttttcaaaatgagataaaactgatgcctgtcattattgccagtagtgttaaagaagccaaagcgttaattaacggtggaaaatacagggaaattattcttaacttcgatattgatgccgatgactttttctctctcgccagccattccgccggaactaaaatctccatcgccgaccgcaacgatcgctctccggtagaatcagcaaaataattaacccgcgagggacgtctatgtggttgtttattggaacctttgcgctggcttttctcgcagcgctgatgctggtctggctcgatgaccggatcgccgaaacggattgaccctgcgctggacgttaacgtcacgcagggctgcgcgccgccgaaaagcggcgcacagcagagacgttacagggaggccgccagccgctcaacggccgtcagcaatccggcttctgacaccgtggagtaagaaagacgcagggtacgggtatccggcttatcgtgatagaacgcttcacccgggacgtacaccacgccgttttccagcgttttcttcatccattccatggtatcgaacggatagcggaaacgcgcccacaggaacatccccccctgcgggcggctgaattccaggtgctcgccaaggcggctttccagcgcatcggccagcgccacgcacttcttgcggtagtcttcgcgaatcaacgcaatctggttatccagccggttcagactgaggtattccgcagtgatcacctgcgacagcatattggtatgcagatccgccgcctgcttcacaatcaccgtctgctgcgccagccagtccggcatgacgatccagccgatacgcatccctggcgcgaggattttcgaaaaagtcgaggtgtaaaccacctgatcttcacagcccagctcgacagcatgctgatagagcgggcgccgaacggcgtcagtaaagctaatttcgccgtagggatcgtcttccagaatgacgaaatcatattgtttcgccagctcaaccaaccggcgacgacgcgcctcgctcagcgttttgccgccgggattgccgaacgtcggcaccaggtaaacagctttgacgcgggtggtctccagcaggtcggccagctgctccaccagcatcccgtcatcgtcggtgtcaacgctgagaatattggcctgcgccagctgaaatacctgcagcgccgccagataagtgggacgctcaacgacgatagtatcgcccggatcgagcagcgtacgggcaacgatatccagcgattgctgggagccggaggtgatatagacctgggcggctgaacaggcgacgccacgggagtggcaaatttcactcaccgcctggcgcagcggcgggtagccttccgtcagaccgtactggaatgcgtcattaaaacgctcgctcatcaccttctgcaccgccagctccaggccttcggtatcaaacagttccggggccggaatgccgccgccaagcgaaatcacgccgggcagtttactgtgcttgagaagttcgcggacggcggagggcttgagttcacccgcgcgggcggcgagacgccgatcgtgcatactattttccttttctgtcttgttgttgtgttaattatcttggcttcgttgcaggtgctccccggcggcgcttaccatgccggggctatccttttcagtacgttgtcacccggacaggggtatgccgctacccgggtttcgtacgtcatgctttgtctttcaaaacgattaacggctcgatatcgctctcttttttcaccaccagcgacgaatcgccgcgcaggcaggtaccgccgtagttaccgccgacggtaaatgtgcacacctgaatgtacttaccgtccactttcggcaggcaccacagctgctggtagatattcttgcgatcgacaaactggccgctggtcttatccagaagttcatcctgagggccgatcaggtcgatattgttgccgcagcgcccggaaataggcttcaccgcatagccggttttcgccagctcgtcgttaacctcaaaatcggtatccagcagatagcgatgatgcgggaacagcgaccacagcaccggcagaatggctttgttgccggggatcaccgtccacaggggttcgaataccaatacttcaggacgcagcaggacgtcaatcagccgcacctcattctgcggatgtccggtacgaatcggtaccgccgcgtactcctcggcgctgacttcgcgcacctgctcaatggcggtttcccatgcccaggttttccagacgcagttgaccagccgcccgtcggcgtcgatcagctgaccggcagcgtcccagcgcagctcatcaaggccaaagagaattttgctctcaaaaccggcctgggtcagcgaacgctgaataaactgcgcgtggtagttctcttccagatccttgtcctgcatgatgtggacgaagggccgcgcccggctgtgtttccacgcccccgccagctcatcgagcagaccttccgccggattgtggccggtgccgtagtagccctgcttcagccactgttcgaggatcagcccgccttcggtatggcaggaagcggaatcggcattgtactcgtacaccttcagcccgcgctcgtccatgcaaaaatccatgcgcccggtgatcatatgatgacggcggcgctgccacgagaggcgcagacgaggccagagaattttcggaatatcgaacagcgccagcaggttgtcatccttcatcaccttatcggtggcgtgcagatacatcaggtgcagctcgttggtggctttgatcagctcctgttcggcactttcgctgatggtgaaatactgatagggatcctggttgatgaaatgaccgttggctgccacgtaggctttctgcagcgggtctttctcgttcagccatttaccgcgaaactggccgttgtttggcagccgcgcgcctttgatggccatcgcctcgcccggcagcaccggctgcggcaggctgtgttcggtatcggcggtctggatcatccagcctaaaatttcggtatcggtaaaggtatctttgatggtgtaccggccgtcgttgacctcgagggtcagctcgcgggtccactgctggccctgcggcagcggcgagtgaatcacgttctgctcggcgatacgcaccttattgtcgacaagctgggtgatcaccgccacatggccggtgtgcttaaactcgccccccttctgccagatcagcagcgaaccagcgataggcggacggcgggagccgttggcgaaggcctgcagcggcagaatattgtcattgaccacttcgcgcaggaaacgcagggagaagatttcataagccatccccacatcggtgaagacaaagccataggtcaggaacagaaagcggcgcgcaaactccacgcactgccatttatgccccatatactcattaccgatgtagctgcgaaacgtcgcgtcatccgggtagtcctgcggatttaagctactgtaattcgatgaataaatcgctacgccaccgggtgcatagcctaacaatgtcccaaacggggcgtcactgcttgtcgatcctttgctcatttagcctgacctcaaattaatgcagcccgggcagttggcgaaacaaaactccctcttcttatcctgccgcaggcacttaccagacagaggtgtaacgatgataccactcattcgtttcgctaatcgtgccgttaaggaaaataaccctgcagccggaaacaaaagtgatatcgttatcggtgatataacaaaaaaacaacgcaacatcaggagtcgacaatgagcacaccctcgcatctgaatgcccaaccgctggtctggggacacggcccgcggacgtttgaggtgttccttgagcccacctgcccctactctgtccgcgcgtttaataaactcgacgatctgctcgatgaggtcggcgccgataacgtgaccatcaagatacgcctgcagtcgcagccgtggcatctgttctccggggttatcgtccgctgcatcctcgccgcgtccaccctgccgcacggcagagagcaggcgcataaggtgatgcaggccgtggccgaccatcgggaagagtttgagtttaccgatcactgcagcgggccgaatatgaacgccacgccgcagcaaatcattgagcgcattgaacgctacagtcacgtgctgctgggggccgcctttgcccgcccggagctgcaggacgtgatcaagtggcacagtaaatacgcccgtcagaacggcatccatgtctcgccgacctttatggtcaacggcctggtgcagccggatctgggcagcggcgatgatgtcagcgtgtgggccgcgcggattatggcctgaggtcacctgctacactttttgtacatccacgaaaaaggcaaaccagcatgtcagagcaaaactaccagccaccaaaagtgtgggaatggaagcaaaacagcggcggcgcgttcgccaacatcaaccgtcccgtttccggcgcgactcatgaacgcgtcctgccggtaggaacccatccgctccagctatactcactcggtacacccaacggccagaaggtgacgatcatgcttgaagagctgctggcgctgggcgtcagcggcgcggagtacgacgcctggctgatacgcattggcgaaggggatcagttttccagcggctttgtcgagatcaacccgaactcgaagatcccggccctcagcgaccattccaccacgccgccgacccgggtatttgagtccggcaacattcttctctatctggcggaaaaatttggtttcttcctgccgaaagatcctgccggtcgcaccgaaaccctcaactggctgttctggctgcagggcgcggcgccgttcctcggcggcggcttcggccacttctataactatgcgccagtgaagatcgagtacgcgatcgaccgctttacgatggaagccaaacgccagctcgacgtgctggacaaacagctcgcccgcggtcgctatgtggccggcgaggagtacaccatcgccgatatggctgtctggccgtggtatggcaacgtagtgctgggcaatgtctataacgcggcggagttcctcgacgccgggagctataaaaacgtgctgcgctgggcgcaggatgtcggcaaccgcccggccgtcaagcgcggacgcatcgtcaaccgcaccaacggcccgctcaatgagcagctgcatgagcgccatgatgcccgagactttgacacccaaacggaagataagcgccaggcgtaaggtcttcaccctttcccgtggacgggaaagggttcccaccacaggacggttccgcctgcgaagccgtcctgtttagctttccagccgatagcccgccagaaaatagcgcatcgccatacccgacccaccttctttgaagaaatccatcaccatatctctgtcaaggccatagcgacgggtgaggatccccgcctcccacgcgctgagctgacggtcaccggttttttcaaacatgcggtgcgagtagccgagcacaaacccgcgtttatagtcggcgcaaaaattcgccgcatgcgcggcggtgtcagcataggatgcctgtagccccgccattaagcctttgccaaaatgattttccatcgcgccctcccaatcgttatataataaattatatagcgtttttttgagcgagcggtagcgctatttatgacggttgcgctagcgtaaatacttctcaaaccatgccagcgtgcgttgccaggccagatcagccgcagtccgatcgtagcgcggcgtggaatcattatgaaagccgtgattcacgccctgatagaaataggcctcgtagactttatggtgttccttcaacgcctgttcataggcaggccagccttcattaatgccgctatcgaggccggcatagtgcagcagcagcggtgctttaattttatcaacctccttcagcggcggctggcgaccgtaaaacggcaccgcgcaggccagctccgggatcgccaccgccgccgcgttgctgacgccgccgccgtagcaaaaaccggtgataccgaccttccccgtcacctgtggatagttcgccataaacgcgaccgccgcaaaaaaatcattcatcagcttcacgggatcgactttctgctgtagggcgcggccttcatcatcattccccggatagccgccgacggcgctcaggccatccggcgccagcgcgatgtaccccgctttcgctacccgccgggctacatcttcaatataggggttcaggccgcggttctcatgcaccaccaccacagcgggcgctttgtcggctatttttgtcggcgtcaccaggtaagcccgcacttcgccgtgaccgtcaggagagggataatgaatatactccgggcggatatccgggtcggtgaacggtacctgctctgccagggcatagtcgggcttcagcagattaaacagcgccagcgcggtcatcccgccgacagtatatttccccgccagctggagaaactcgcgtttactgattttgccgtgggcatagtagtcataatactcgagcaactgctgcgggaaatctttggccgttaatcgcgtcatcaccctgcctccgttgttaagcgctctttaagcaaagcagaagcccggacatacgccagcccagaaaagcataaaacggggaggaacagcccagcggctaacaccgccgggagagaagggatcagtgtttcactttggtcagacgatcaaggtagcccatcacaaaggccgaaagcacgaaggtcaggtggataatcacgtaccacatcagcttattgtccgggacgtttttcgcatccataaacacacgcaacaggtgaatagaggagatcgccacgatggaggcggcaaccttatttttcagcgaagtcgcgtccattttgcccagccagctgagtttttctttaccctcgttaatatccagctgcgagacaaaattttcatacccggagaacatcaccatcaccagcaaaccgcccaccagggtcatatccaccagcgacagcagggtcagaatcatatccgactcactgacgctaaaaatatgcggcagtatgtggaagatctcctgaaaaaatttgatggtcagcgcaatcagaccgagcgagaggccaaaataaaccggcgccagcagccagcgcgaggcgtacatagcattttccagaaagcgttccataagatcctgtcagttaacataaacggccgccattatatcgcaacagggtaacgcttatgcaacatcagccgcccgcgtcatccgcaggcggccagaaacggtttctttaaagtatgacctcaaagtcctgcaaagcggagtagccctcgctttgtaggccaaccattgaagcagccagcaggccaaatttcgcaccgacccattttcccttcccggcagcaaaacaaagaggaaccttccgccactcctcctcggctcgccaggaaaattgacacaggccgccttcgcctacggccacctgcagctgacacttgccgcacttaagctcagcaagaacctgacgagtttcgcgcaccacgcccgcatcgctcatccaaccgtgtcgccacacgagccggtaacccccttgcccaaactccaccagcaaagcggcgtagcgttcgccgtatacgatcaggcctccggcatcaccgtcctgagcggcatataacgttacgcttgttttcgcgctaaaagttagcgccgggaatttctgcagcaacagctgcggcgcccagtataacgctctctgtccatcgacttcggataatgggacgcagcgtaatcgaagttcgccttccgccggcagcagccactcagggctggggttagcctgccactgccactgtattcccggttggccttgcgcaaaatagtcgctggtttgcggcgccattgccggtgaaggcgttaaccctttaggacgcggccaacgtaaaaccggctgtccgacgccgccgttgccaatctgctcaccgatacgcggccagccatcgttaccccaggacatcggctggaggtgaaccacgcggccatagaggtgtaagtcctggaaatgaacaaaccagcattcgccctcctcaccctccacccagccgccctgatgtggtccgtttatcgaggtgtttccctggaaaagcacgtttttggcttcccagggccccgtcatctggcgcgcgcgcagtaccgtctgccagccattttcaaccccgcccgcaggagcaaagatgtagtaccaaccggcgcgttgataaacctttggcccctcaagggtaggtaaatcgcagcagccgtcatagataatctgcccttcgcccagcaattcgctggcgtccggcgccatcgcaaacaactgcagtttatgcttgatgccgctgcggctatgggcgaaggcatgtaccaaccaggcctgaccattgtcgtcccagaacgggcagggatctatccaacctctggcctcgcgcaggcagtgcggagcgctccattccccccacggatcctcggtatggcagataaaaataccttcatctggcgtgctgaagcagacccacagcttgccatcgtgccagcgaatcgacggcgcccatacgcccttacccggctgataccggtcataaccaggtagcggcagttcatccataacgtggttgatgatagtccaattaaccaggtccgttgaatgcaggatcggtaaagcgggcacatggttaaaactggaagagaccataaagaaatcatcgcctacgcgcacgatatccgggtcggaataatcggcgcataagataggattctggtattcagaaggggtcatatttcgcatctcctcaggccttttccggaacggcgtttagcggcaaatgcgtctctgaatgcccctgctgctgacgcatggacagctcgcgctgaattgtctgcatcattttgtcatccagcttatagaaacgcgccagccaccacaggagcaggtaagatagtgatggaccgagggttaacagccccacaattcccattgtcgccagcggagtctgcgccgttacgcccgcctgatagccaaatagcccaagcgaaaaacctacggcggcgccagcaaccgccatgcccattttcaaagcaaacagattaccggaataggataatcccgtgatgcgacggccaaacttccattcgccataatcggcagcgttggccatcatgttccatttaaacggctggtacatctgatggaagaagccgaccaggaagtataaagggaacaccaccggcagccaggtcggcggcacaaagaacattacgacgccaaccaggaccagcaggaggttgatatttttaaacagcgataccgcgcgatagcgcttggccagccatccggcggcgatgctgccgataatcgtgccaacgacactggtggaaacaaatgctgatttcatggccgttcccgccgctgactccacaccgcctaacatcaggtaggttgcataatagagcgtggcggcgctgcgcataaccccggccatactggagaaaaaagtaattatcgccacaatacgccactggtcattcgccagcagctgacggaggtcttcgcgtatgctcccctgctgttcaacagctggagccacgcgttctttggtagagaagaagcaaaaagccagcattacaatagcgatcgcgcccatgattcccattgtcgcctgaaaaccaaactgcttattttctttaccgaaaaaatccaccaggaacagggttgcgacagaaaccatcagaccggccagagatgagatcgtaaaacgatatgactgggctgaaaggcgatccttctcatcacgcgtaatgactccgcccaatgcgcagtagggaatattgataaaggtgtaacacagcatgagtaaggtgtaggtcaggtaggcataaaccagtttacccgatgcgccaaattccggagtcgtgaaggtcattaccgccagcacggcataaggtacggcaaaccagataagccacgggcgaaaatggccccagcgggtctttacacggtctgcaacaatgccggttagcggatcggtaatcgcatccagaacccgcgtcaccaggaacatcactccgactgcggcagcagaaagcccgtaaatatccgtataaaaccatgtcagaaacatggttaccgaagagtaaacgataccgcaggctgcatcccccatgccatatcccagcttctccgcaaatgacagtttattatcgtgattcacaatataatccctctcagatgaagtggtattcactgtagaggcaggataaaaactatcctattgtcatttttcgcatcgggtttatgttttctgttaactgagaaagttgtcacacatctataagattggtcttacaagttattgcgtcacctattaaaaagctggcgcaaggccagcctgaggagaaaagtggaaagggggaggttacttcgctttgacggtctcttcgcccaccagcccgatcttgagatagcccgcctgatgcagggtatccatcactttcatcatcgtctcgtaatcgacggttttatccgcgcggaagaagacggtggtatcttttttgccggcggtcaggctatccagggcgttaatcatattcgcttcggtaaccgggtcgttgccgaggaacatgctcttatccgccttcaccgacaggtagatgggtttttccggtcgcggttgcggctggctggaggaggctggcagattgaccttcacgtcgaccgtcgccagcggcgcggccaccataaagataatcagcagaaccagcatgacgtcgataaacggcgtcacgttgatctcatgcatttcgccgttatcgtccaggttttcattaagacgcatcgccatagccgatcaacctacccgtaatttctgcgcgctgcgcaccggcttcacgccgctggcgctgaggtccagatcgcggctttgcagcaggagtacctgagcggcgacgtcgccgagcgaggccttgtagctgccgatcatgcgggcgaagatgttatagatgaccaccgccgggatggcggcgaacaggccgatggccgtcgccagcagcgcttctgcgatgcccggcgctaccaccgcaagattggtggtctgggtctgggcgatgccgataaagctgttcatgatgccccagacggtaccaaacaggcccacaaacggggaaatggcgccgatggtcgccaggtagccgttaccgcgccccatatggcgaccgaccgccgcaacgcggcgctcaaggcgaaaaccggttcgttccttgatgccttcattgtcttcggcaccggcagagagttcgagttcgttctgcgcttcattgataagctgggtggtgaggcttttcgcctcaaaggcgctggcgatatcactggcctgatcgagagagcgggcttccgccagctgctgctgttcacgtttgaggcgacgcttgctggcgaggatttccgcccctttaccgaagaagatggcccatgtgacgaccgacgccagaatcaggccaatcatcaccaccttaacgacaatatcggcatgatgatacataccccaaacggagagatccgcctgcatcaaattattacccacgctctatctccacgacgataatcacaaaatctgcccacaataatatcaaaacgacatcgaattgatagtggttctcattagtatttacactgtgcagcaaatcacgtttattttccttgcgcttacgcagtaaaaaagcggctaaccgcgggcctggtaaaattttcgcctgtatcggcggtgcgctggtacagaaaagcagattcatgttagtttagacgtccagacgtataaaaacaggttcgtcaacatggctgataaacatcttgataccgcgctggtcaacgccgggcggagcaaaaagtacacccagggctcagtgaacagcgttatccagcgcgcgtcatcgctggttttcgacaccgtcgaggccaaaaagcacgccacccgcaatcgggccaacggcgagctgttctacggtcgtcgcggcaccctgacccatttctcgctgcaggaagcgatgtgcgagctggaaggcggcgccggctgcgccctcttcccctgcggcgccgcggcggtggctaacactatcctggcgtttgtcgagcaaggcgaccatgtgctgatgaccaataccgcctatgagccaagccaggacttttgtaccaaaattctcgccaaactcggcgtcaccaccagctggttcgatcccttaatcggtgccgatatcgcccgtctggttcgccctgagacccgcgtggtgttcctcgaatcgcccggctcgatcaccatggaagtgcacgatgtgccggcgatagtcgccgccgtgcgtcaggtcgccccggaagcgattatcatgatcgataacacctgggcggcggggatcctgtttaaagccctggattttggcattgatatttccattcaggcaggcaccaaatacctgatcggccattccgacgccatggtgggcaccgcggtggcgaacgcgcgctgctggccgcagctgcgtgaaaatgcctacctgatggggcaaatgctggacgccgatactgcctatatgaccagccgcggcctgcgcaccctgggcgtgcgcctgcgtcagcatcatgaaagcagcctgcgcatcgccgagtggctggcgcagcacccgcaggtggcgcgggtaaaccaccccgccctgcccggcagtaaaggtcatgagttctggaaacgtgatttcaccggcagcagcgggctattctcgtttgtgctcagcaagcgcctcaatgatgccgaactggcggagtatctcgacaatttcagcctgttcagtatggcctattcgtggggcggctttgagtcgctgattctcgccaaccagccggagcaaatcgcccacattcgaccggatgctgaagtcgacttcagcggcacgctgatccgcctgcacattggtctcgaaaatgttgacgatctgcaggcggatttagcagcgggcttcgcgcgtatcgtgtaaagtgacagtcagtggcaacaatagcggacgctttttagcaaagcggccgcttttgttgcgcccgggatcaaggtgctcgggcctcttcaggagtacactagtcaacaatacggtaccacttaggaaagtccatggttgtcattcaagagattgtcgccgcgctgtggcaacatgattttgccgcattggcgaaccctcacgttgtgggcgttgtatatctggttatgttcgcgaccctgtttctggaaaacgggctgctgcccgcctcctttttaccgggagacagcctgctgctgctcgccggcgcgctgattgctaaaggcgtcatggactttgtgcccactatcgccattctgaccgccgccgccagcctcggctgctggctgagctatgtgcaagggcgctggctgggcaatacgcaaacggtgaaaggctggctggcgcatctgccgcataagtaccatcagcgcgccacctgcatgtttgaccgccacggcctgctggcgctgctcgcgggccgttttctggcgtttgtccgcaccctgctgccaaccatggccgggatttctggcctgccgaaccgccgcttccagttcttcaactggctgagcgccctgctgtgggtctgtgtggtgacgggtcttggctatgcgctgagcatgatcccgtttgtgaagcgccatgaagatcaggtgatgacctgtctgatgatcctgccgattgccctgctgctggctggcctgctcggcacgctgttcgtggtcattaaaaagaaatattgcagcgcctgacgcttacctgccggggggcctgcgcccgcccggccgccctttcccggtattacatcccctgcatcgtgcgaatacgcgcggcgtcttctcccggcgtcaaaccgaagtagcgcttaaactcgcggctgaactgcgaagggctttcatatcccacgcgcatcgccgccgcgctggccttcatgccgtcatggatcatcagcattcgtgctttgtgcaaacggtagtttttcagatactgcaaaggagaagtgctggtcaccgctttaaaattatggtgaaacgctgacacactcatattcgcttccgccgccagccgatcgacgctgaggttttcggtgtactggctttcgatatgcttgagcacgcgacttatcaggctgaagtgggtctgccggctgaccagcgccaacagcgcgccgccgcagggccccgtcagcacataatacagaatttcgcggacgatttgcttgccaaggatccgtgcgtccagcggccgctccatcacgtcaagcagccgttcggcagcgcacagaatatcctccgagagtaccgcggagtttatcccgctggaggcgaccgcgggctgaaacagcggatcttcgccaatatccatcagcagctcttgcagttgcaggatatcgacgttcaggcgcatcccggcgaggggcacctccggggtggcaaaggtttcgcactcgaaaggtagcggcacggtcagcagtaaatattcgtttgtatcgtagcgaaaagtccgttcattgatataaccaattttatggcccgaaaagagaaaaacgatccccggctgatacatcaccggcgtccggggccccggttgcgttccgtacagcaaacggacgtcaggcagcaacgaacttaacatttcgtgcttatctttcagcaggttaatcttctccgttaatgtccgacatatctctgcgtgttgcattgccaccgtctctcccgatgtttcttcacctgtacattgtgcgcaggccgctacaaattctccagccatatggagaaataggcaagacatcggcaggaatgtgcattgagggtcaacggcgccaggaccacaataaccttcatcgggcagcggtatcgtccctgtcgacggttttactctttggaggacttaagcaatgaataatttcgacctgcataccccaacccgcattctgtttggcaaaggcgcgattgaaaagctgcgtgaacagatcccggcggaagcccgcgtactgatcacctacggcggcggcagcgtcaaaaaaacaggcgtcctggatcaggtcctcaccgctctgaatggcctggatgtccttgaatttggcggcatcgagccgaacccgtcttacgaaaccctgatgaatgcggtgaaactcgcccgggaagagaaagtgaccttcctgctggcggtcggcggcggttcggtgctggatggcaccaagtttatcgctgcagcagcccactacgacgcggatatcgatccgtgggaaattctggaaacctatggcagcaaaattgccagcgccattccaatgggctcggtactgactctgccggcgaccggttctgaatccaacaaaggcgcggtcatatcgcggaaaaccaccggcgacaaacgcgcgtttatgtcttcgcacgtccagccgcagttcgcgatcctcgatccggtttatacctataccctgccgccgcgccaggtcgcgaacggcgtggttgacgccttcgtccataccgtcgagcagtacgtgacctacccggttgacggcaaaatccaggaccgcttcgccgaaggcattctcctgaccctgatcgaggatggcccgaaagccctgcaggaaccggagaactataacgtgcgcgccaatattatgtgggcggcgacgcaggcgctgaacggcctgatcggcgcaggcgtgccacaggactgggcgacgcatatgctcggccacgagctgacggcgatgcacggcctggatcacgcccagacgctggctatcgtgctgccggcgctgtggaatgagaaacgcgatgccaagcgcgagaagctgctgcagtatgccgagcgcgtgtggaatattaccgaaggctctgacgaccaacgtatcgatgccgccatcgccgcaacgcgtcagttcttcgagcagatgggcgtgccgacccgcctttccgattacggtctcgacggtagctccatcccggcgctgctggcgaaactggaagagcacggcatgactaaacttggcgaacatcaggatatcaccctggacgtcagccgccgtatttacgaggctgcacgctaagcgctccccgcctgattcacctctccttacgttaaacaaacgccggggagaggtgtttttactaccgtttttagctatttcgtccagacttaatgctacccctcggcggatcctgcttcgccgagttcattaacaggaggaaggcatgacacatccaaccgttataaaactgcacgacggcaacctgatgccgcagctgggtctcggcgtgtggaaagctggcaacgaggaagtcgtctccgccattcataaggcgctggaagtcggttatcgctcttttgacaccgccgccgcgtaccaaaatgagaccggcgtcggcaatgcgctgcacagcgctggcgtcaaccgcgatgagctcttcatcaccactaagctgtggaacgacgatcaaaaacggccgcacgaggcgctgaaagagagcctcagcaaactgaagctggactatgtggatctctatttaatccactggccggtaccggctatcggccattacgtcgaggcctggcaggcgctgatcgagctgcagcagcaggggctgaccaaaagcattggcgtgtgtaatttccaggtaccgcatctgcagaagctgattgatgaaaccggcgtcgccccggtgatcaatcagatagaactccatccacttatgcagcagcgtcagctgcacgcgtggaacgccacccacaagatccagaccgaatcctggagcccgctggcccagggcggcgaaggcgtcttcgatcaaaaagtcatccaccagctcgccgataagtacggcaaaacgccggcgcaaatcgtcatccgctggcatctcgacagcggtctggtggtgatcccgaaatccgtcacgccgtcgcgtatcgcggaaaactttgacgtctgggacttccgtctcgacaaagatgagctgggagcgatcgcgaagctggaccagggtaaacgtctcggtcctgacccggatcagttcggcggataatgctctctcttgccatcgcctttagcgcctcggcgttaaaggcgatcgcagaccagatgaatatcctctggctccagcgcaaacagcgccgggtcgggcttatccgctaagcgacatccctgagccagataaaaatcgacggtgtttttgttggggatcgacgagatatagaggccggacgcccccatttctggcagctggtgcagggcatactgaaacagtcgccgcccccagccctggccgcgctttcccgccccgacataaaagaataatagctggcgcagctcgccattcatgccgcgaggcagcgtatccagcgccgctgcggcaatcatctgctcatcgtcaaaaaaggcgaaaaaaataccgccgcgatcgtaacaggcctcgtgaatcggagtataaacctgacgatcgtgagggtcccagccacgcacgtcataatattcccgataagcccgcagctgaccgttatcgagacggtagagcgtatcgataatttcgctgcggtctatctcccagagctggtccagttgttgtcgcgacaggatgaccggcgtcatcacctctctccttttttcacagatgttcccggcgagcgatcccgccgggccagccgcttagcgtgatacggccttcggcttaacgcgttttttcgcgcccgcagcggcaggcgtctggcgctgatgggcgatcggcgtgtgcttggtcagcgccggacgagtatggcggttctggcgacgcgcttcacgcatttcgtccagggttggcgctggcaccaggcagtcgcgacgggagccaatcaggtgcttcttgcccatcgcctccagcgcctgacggatcagcggccagtttgccggatcgtggtagcggagcagcgctttgtgcagacggcgctgtttatcgcccttcggcaccaccacctcttcgctcttataaccaattttacccagcgggttcttgccggtgtaatacatggtggtcgagttcgccagcggcgacggatagaagttctgcacctggtcgagacggaagcgatgcttcttcagccacagcgccaggttcaccatatcttcatcacgggtccccggatgagcggagataaagtacgggatcagatactgctctttacccgcctgcttcgaataggtgtcgaacagctctttaaagcggtcgtagctgcccattcccggcttcatcatcttcgacagcggtccctcttcggtatgctccggggcgatcttcagatagccgccgacgtggtgggtcgccagctctttgatatagcgcggatcttcgaccgcgatgtcatagcgtaccccggaggcgataaggatcttcttgatgcccttcagctcgcgagcgcggcgataaagattgatcgtcggttcatggttggtatccatgtgtgggcaaatatccggatagacgcaggagagacggcggcaggtctgctcagcacgcggcgatttacagcgcagcatatacatgttggccgttggcccgccgagatcggagatcaccccggtaaagccgggcacggtgtcgcgaatggcttcgatctcattaatgatcgaatcctcagaacggctctggattatgcgtccttcgtgctcggtgatcgagcagaacgaacagccgccgaagcagccgcgcatgatgttgattgagaagcggatcatctcatacgccggaatacgcgcatcgccataggaaggatgcggcacccgcttgtacggcagcgcgaagacgctgtccatctcttcggtggagagcgggattgccggcggattgatccagatgtagcgctcgccgtgcttttgcatcagcgcccgggcgcagccggggttggtttcgtggtgcaaaatgcgcgaggcgtgagcgtacaggaccttatcgcctttcaccttctcgaaggaaggcagcagcacataggttttttcccacggtttgggccgcggcggttgcacagtaatgcttttcgcttcctgttttttcggcgcgaccggtttgttatcggcgcacggcagatcttcaccgtacggatgcgggatggggtcaattttaccgggcgtatccagacgggtggagtccacgccgctccagcccggcagcgcctctttcaccatgatggcggtattgcgcacatcgcggatctggtcgatggtttcgcccatcgccaggcgatgagccacttccaccagcggacgctcgccgttgccgaacatcagcatatcggccttggagtccaccagcactgagcggcgcacggtgtcggaccagtaatcatagtgggcggtacgacgcaggctggcttcgatgccgccgaggatcaccggcacatctttccacgcctctttacagcgctgggtatagacgagggtagcgcggtccggacgtttgcccgccacgttacccgccgtataggcatcgtcatgacgtagtttacggtcggcggtgtaacggttgatcattgagtccatgttgccggcggtcacgccgaagaacaggttcggttttcccagacgcataaagtcgtctttgctgttccagtccggctgggagatgatcccaacccggaaaccctgcgcttccagcatgcggccgcagatagccatcccgaagctcgggtggtcgacataggcgtcgccggtaaccagaataatgtcgcagctatcccagccaagttgatccatctcttcacgcgacatcggtaaaaaaggcgcagggccaaaacaggcagcccagtattgcggccaggaaaaaaggtcacgatccggttggatcagggatattgcgctcatattgcttccggggaaaatgataaaaaaataaccaaaagggcgtggattataagccggaatgatagtggaaatgaaggaggattttctcaaaccctgaccgtgcgccggccagggtcaaagagattacggcgcgggattcaccagcatctggccgatcgagccgcgatcggcaagctccagcgtctggctcagatactggaacgggaagtgcggccacgacggttgagcgtaatagaccagcagctcaacctgcccgtcgacccacacggtgtccttccagccgcgatcttccgggaaaggagacgagccgttgacattacggatctggaacatcaccccttcaatatggaacgactgcgggcggtcggcgcgcaccgtccagcgctcccaggtcccctgctgcgccgtgatatcgatacgctgcggatcccacagctggccgttgatgcccggatcgtcgccaagggtgatatcccggctgcggatcggcgtaccggagagcagctcggtcggcagcaggcgcaccggcagactgtcggtcaccagcggcagcagcccggtcggacgcagcgtcagcaccagcgtggagaccaggatgcttgacggttcaaaaaaaccgcggatacggtcgacgatgctcgccgcttcgccgcaggtaatggatacttcatcgccgttagtcatatcgaccagaatttcacgccgctcccccggggccagcgatagctgcttgagcgaaaccggcgccggcaggaatccctgatcgccggaaatcacatgcagcagtcggccatcgctcatctgcagctgatagcgccgggagttggaagcgttcagcaggcgcaggcgcacccagccgcgcgacacttcaacatacgggctctgcacgccgttaaccagcagcgtgtcgcccacaaagccgccgctgcccggttcgctatattccggcgtgccgaagttatccagccgtttatcctgaataatcaccgggaagtcatcgactccatagtggttagggatcggcaggttcttgctgacctcgtcttccaccagccacatgccggccagaccgttgtaaacctgtttcgccatccggttcggcgtgttggcctgataccacagcgtcgccgcgctctggcggataggcagcaccggcgcccagtcggcgttcggcgacatcatgcgcgccgcgccgccaatcagcgggccaggcacctgcagaccgcggatggtcatcgccacgttctccgtcaggcggttgctgtagataagcttgacgtcgtctccgttccagacgcggatcgtcggccccatatagcggccattgatcccccagacgggggcgcgggtgccgggggtaaacgaccagtgggaacgctgcagcgtcagaaacagcggctggccgcgacgagattccagcagcggcggaaccggcagcgcaggctgctggccggcggcatgggccttcagcggcgcggcgccagcgcacagcgctacgccggaagccttaataaactgacgccgactgagtgacatattaactccatgacatactgacaaatgaaaaagggaattcgtttcccgccagcaatacgcgcgcgttggcggcgtttcctgtcttattgctttccagccgcttcgcgctcggccacttcgttgtccagatcagcgattttggcggccatcagctcgcggcaatgcgtcgccagcgcacgcacgttgtctttaccaaactgagtggtatctaccggcggcagcatttccacaatcaccagaccgttgttccagcgattgagctttattttattcgatgtattcgagacacacaccggaataatcggcaccccagcggcaatagccgcgtgaaaagccccggttttaaacggcagcaggccgcggccgcggctacgggtcccttccgggaacatccagaacgaaattttacgctttttaaaagcgttgacgacttcggcaatagtgccgtgcgctttggttcggttattacggtcaatcagcaaattgcccgtcagccagtacagttggccaaagaacgggatccacagcaggctctttttacctacggtgaccgtcggagcctgcacgatattcgacgccgtcaccatatcatagttgttctggtggttagcgatgtagatcgcgttgccatagctttccgcgtcggcgggtttgcgtagctctaccttgaggccaaataccggagataaacggccaaacagatggccgaaagtggcaacgtgttttggattacgtgggctgaacaagcagtacagacagccaagtacgcacactacgatgcaataaatgaccacgaaaattactcgaaaaatgaatagcatagctacctctaaaacccaaaccgcttagaattattcgctgctggcagaaggcaggctcacaagttctgcgcaggccgggaccgttcttcctgggtccctgatgatggacattgttaatcgcaacgcctgaataaacaacgattttgcggcattttttcgtctcctcccgtcaaagacgggaggagacgcgcttactcttcgctatcgcctgccgcggcacgacgcggcgagtcaatttccacgcggtcaattttctgcagcccgcgcatcagcgaaccgcggcggccgcgctcgccggtgactttttgcagctcttccggacgcagtttgatcttccgtttgccgacgtgaatggtcagcgtactctgcggcggcagaacaaacagatgtgccagaccgtcctggccggctgcggcttccgccgccggaatgctgataattttgttgcccttgcctttcgacagctgcggcagatcgctgaccgggaacatcagcatccgcccggcggcggtgatggccagcagcatatcggactcatcctcaatcaccagcggcggcatcacgtgcgcgttgtcaggcagggtgattagcgctttcccggcacggttgcgcgccaccagatcgttgaaggtacagacgaaaccgtagcccgcgtcggaagccatcagcagtttctgatcgtcgctttccattagcatatgctccacggtcgcgcccggcggcagggtcagtttgccggtaagcggttcaccctggccacgcgcggaaggcagagtaatcggatcgatggcatagctgcgtccggtggtatcgataaacaccaccggctggttgctcttgcccttcgccgaggctttccagctgtcgcccgccttatagctcaagccctgggcgtcaatgtcgtgtcctttggcgctgcgcacccagcccatctgcgacagaacgatagtcaccggctcagacggcagcatgtcatgttcgctcatcgctttcgcttcttcacgctcgtgaagcggcgagcgacggtcgtcgccgaaggcatcggcatcggcctgcagctcttttttcagcaggttgttcatcttacgttcagacgccagaatcgcctgcagctggtcgcgctctttttccagctcgctctgctcgccgcggatcttcatctcttccagtttggcgaggtggcgcagttttaattccagaatcgcttccgcctgggtttcgctgatgccaaagcgcgacatcagggccggcttcggttcatcttcagtgcggatgatctcaatcacttcatcgatattaagaaacgccaccagcaaaccttcgaggatatgcaggcgcttcagcactttctctaaccgatggtttagacggcgacgcacggtatcgcgacggaacaccagccactcgctgaggatctccagcaggtttttcaccgccgggcggccgtcaaggccgatcatattgaggttgatgcggtagctcttctccagatcggtggtggcgaacaggtggttcatcacctgttccatatccacccggctggagcgcgggacaatcaccagacgggtcgggttttcgtggtccgattcgtcgcgcagatcgtcaaccatcggcagctttttattgcgcatctgcgccgcaatctgctccagcactttggcgccggagacctgatgcggcagcgcgctgatcaccaccgcgccgtcctctttactccacaccgcgcgcatgcgcactgagccgcgcccgttctggtagattttgcgaatttccgcccgcgaggtgatgatctccgcctcggtcgggaaatccggcccctgtacgatatccagcagttcgtcgagggtggttttcggctgctcaatcagcgtaatcgccgctttggccacttcccgcaggttgtgcggaggaatatcggtcgccatgcctaccgcgatgccggtggtgccgttcagcaggatgttcggcagacgcgctggcagcattttcggctcctgcagcgtgccgtcaaagtttggcacccagtcgaccgtcccctgccccagctcgctgagcagcagctcggcatacttcgacaggcgggattcggtgtaacgcatggcggcgaaagatttgggatcgtccggcgccccccagtttccctgaccatccaccagcggatagcggtaagagaacggctgcgccatcagcaccatcgcttcatagcaggcgctgtcgccgtgcgggtgatatttacccaacacgtcgccgacggtgcgggcggactttttgaatttcgcgctggcgttcagccccagctcggacatcgcatagacgatgcgacgctggaccggttttaagccatcgccaataaacggtaatgccctgtccatgatcacgtacatggagtagttcaggtaagcattttccgtaaattcatgcagcgcaaggcgctctgccatatcgctcattaatcgtggatcctcaatctgggtaccgaccgttcggacggcaaaactacccgcgataatacccgatctcacgccctgagtcacaggccgtgagatcggctgaggattccgtcacgcttaatcaggccagcggcagataaatatcggtttgcagttcatgctcagccacctcatggacaaaattgaggtaacggaagtacaccggaaaatcccgtaacgtctcgcctgaagcgggtaaccagtcgcgatagagaaaccaaacgctgttcgccagcgtgtccagcgagccgtgatggcgcacgacggcgcagcgtcctccggggatttcgccgttaatcacgccaaaggcgttttcaccaaccggccaatcgaccgtaccgcagatatcaaaacgaaatgcctcctgcggggtggtctgcggatcgtcccaggcgatcccccaggtatagctggtggcgacgggcgataatccgctcgtcttacgccaggcgataaaacgcgcggcggtggcgttgacaaggtccgggctaccgcgatgttgcagtacggctatccgggtggaggggcacgaaataatgttgacgtccatcgacgtttgctcctgtagcgtatgtttcggtacgcgtcgatgccactcggcccagtccggttgttgacggaattgggtcgggctttggtcaaacgcggtacggaaggcacgactgaacgactccgcattctgaaatccggcatcaagggcaatatcgatgactttatcgcgggggttgaacgccaggcgccaacaggcgcgtcgcagacgcaaccactgaatataccggtacaatggaatgccggtataggcgctaaattgccggtgaaaatggtaaggcgaactgtgcgctatcgcgctcagcgtctccagcgacagcggctcatcaagatggcgcgcaatgtacctacagacacgctggaagcgcccgacatacgccgggctggccttaatatcgttcatcgtctcctcctcgcgacatactctgacagagcgaggatcgcgattcctgaccgatcttgcgcttatccgacggagacttatggcgcgattttacggatctgtttaacgtcgatttctaccgagttccagtccttatcgacttccccctgaatttctactgtgtcctgcgggccgacggtcacgccgttccagcgcttgtggtcgatatcgacattgatcaccccggaagcatcctggaatttatacaggtcatcagagatgcgctcgacgattttaccgcgcagggtcacccaggtgtcatcacgcagcgacttggcgttcgccacggtggtcaccgcgccgctcggcccggtgaagccgccagcctgggtggtagtggtagtagacggtccggtgaatcctccctgcccggcggccagtaccggcatggaaaccaaagcaataatcgcggtcatcgcagcaatttttttcatcttatattctcccttttgtggtggtatggctcctattacgcccgacaaaacttaacgacttcttaagcggaaaaaagaaattttaatgctgtacatcacccgcttcaacgcggtttactgcgcaaagaaacgggatcgtcggagggaaacatgcgcatattactggtggaagatgacaagcttatcggcgacggcatcaaagccgggctgagcaaaatgggctttagcattgactggtttaccgccgggctggagggcaaaaatgccttatacagcgccccctacgacgccgcaatccttgacctcaccctacccggcatcgatggcctcgatattctgcgcgaatggcgcgataaaggccgccatgagccggtgctgatcctcaccgcccgcgatgccctcaaccagcgggtggagggcctgcgcctgggcgccgatgactacctgtgcaaacctttcgccctgattgaggtggcagcgcgcctcgaagcgttgatccgccgcgcgcacggccagagcagcagcgaactgcgccacggcaaggtgatcctcgatccgaaccgcttaaccgccagcctcgacggcgaaagcctggcgctgaagccgaaggagttcgccctgctggaactgcttatgcgcaacgccgggcgcgtattgccgcgtaagcttatcgaggaaaagctctacacctgggacgacgaggtctccagcaacgccgtggaagttcacgtccatcatctgcgccgcaagctcggcagcgactttatccgtaccgtccacggcatcggctataccctgggtgacgcatgaaacgacttgcccgcctgagcctgcgcctgcgcctgacgctgctgtttgccgtactgaccgccgccgcctgggggatggccagcgttatcgcctggcagcagaccagcaaaaagctggataagctgttcgatacccagcagctgctgttcgctcgccgcctgagcgtcatgcatttcgatgaactgcgcgccccgcccgcctcgctcggggaaaagaaaaaggtacgccacgggcacatcgacgacgacgcgctggcgttcgccatcttcacccgcgacggcaaaatggtgcttaatgacggcgagaacggagaggatattcagtggaattcgcagcgcgagggattcagcgatggctatctgcgtgacgacgatgacgagtggcgtttcctgtggttaaccaccgccgacggccgctaccgcatcgccgtcggccaggagtgggattaccggcgcgaaatggcgatggatatcgtgacctcgcagctcaccccgtggatggttgccctgccgctgatgttcgtgctgctcatcgtgctgttaagccgcgagctggcgccattgaaaaatctggcgcgcacgctgcgcctgcgcgcgccggactcggcggattcgcttagcgtggagaagatccccgccgaagttcgcccgctggtcgaagcgctgaatcagctgttccgacgcactcacgacgccatgctgcgcgagcgtcggtttacctctgatgccgcccatgagctacgcagcccgctggcggcgctgaaggtgcagaccgaagtcgcccaactctccctggacgatcccgaagggcgtgagaaagcgttggatcagctccaccaggggatcgatcgcgccacccgactggtggatcagctgctgacgctgtcgcggctggactcgctcgcccaactggatgatgtgcagcaggtcgctatcgccgatctgctgcagtcggcagtgatggagatgtatcacccggcgcagcagtccgggattgagctgcgcctgcatcttaatgccagccatatcgtccgcaccggccagccgctgctgctcagtctgctggtgcgcaatctgctggataacgcggtgcgctatagcccgcgcggcagtcaggtcgatatcacgctcaacgcccgcgagttccgggtgcgcgataacggcccaggcattagcccgcaggcgctctcgcgcattggtgagcgtttttatcgtccgccggggcaggaggcgccgggcagcggcctgggcttgtcgatcgtccggcgcatcgcctcgctgcacggcatgcaggttgattttgccaacgcgcgcgacggcggcttcgaggcccgcgtgtactggtagcgagattattgctcatttggcaaaagactttgcacattttgctcattttactgccccgcttcgcggggtaagatcgtcggcaaattttcatatatgagggtaaaaaatgagcaacatcctgattatcaatggggcgaaaaagttcgcgcactctaatggtcaactgaacgacaccctgaccgaggtcgcggagagttatctgcgcgacgccgggcacgatgttaaaagcgttcgcgccgaaagcgagtacgacgtaaaagaagaagtacagaatttcctgtgggccgatgtggtgatctggcagatgccgggctggtggatgggcgctccgtggacggtgaaaaaatatatggatgacgtctttaccgaaggccacggctcgctgtacgccagcgatggccgtacccgctccgacgccagcaaaaaatatggctccggcggcctggtgcaggggaaaaaatatatgctttctctgacctggaacgcgccgatggaagccttcaccgacaaagaccagttcttccacggcgtcggcgttgacggcgtttacctgccgttccataaagccaatcagttcctcggcatggaggcattgccaacctttatcgccaacgacgtgattaaaatgcctgatgtcccacggtatatcgcagaatatcgcaagcatctggcggaaatttttggttaactagaggtctagctctacatatttcgagttattcgaacctggagtatgacgagatccacacagaaggagttgagttaaccatgttaacagtgattgcagaaatccgtacccgcccgggccagcaccaccgccaggcggttctcgatcagttcgcgaaaattattccgaccgttttgcaggaggccggctgccacggctatgccccgctggtggatcatgccgccggcgtcagcttccagaccacagcgcccgactctatcgtcatggtcgagcagtgggaaagcgtcgcgcatcttgaagcacacctgcaaaccccgcacatgaaagcctggtcggaagcggtcaaaggcgatgtgctggagaccagcatccgtattctgcagcctggcgtttaagtccgccgactcagtaatgccatgaaaaagggagcctgaggctcccttttacgtctggcgcagcgtacagacttacacttccagatccgccatatcgcccttctcctgcagccagttgcgacgatcttccgaacgctttttggccagcagcatatccattatcgccgtggtctgctgctcgtcctcatcgcttatcaccagctgcaccaggcggcgggtattcgggtcaagggtggtttcgcgcagctgcatcgggttcatctcaccgagccctttaaagcgctggacgtttggcttgcccttcttgcgctttagctgctccagcacgccggttttttcttcttccgtcagtgcgtagtaaacctctttaccgaggtcgatacggtacagcggcggtagcgccacatagacgtgcccctctttcacgagggtacggaaatgtcttacgaacagcgcgcacagcagggtggcaatgtgcagaccatcggagtccgcatccgccagaatacaaattttaccgtagcgcagctggcttaaatcatcgctatccgggtcaataccaatcgccaccgaaatgtcgtgcacttcttgcgaagctaacacttcatcggaagagacttcccaggtattaaggatcttgcccttcagcggcatgatcgcctgatattcgcgatcgcgcgcctgcttggctgagccgcccgccgaatccccctcgacaaggaacagctcggtacggttcagatcctgggcggtacagtccgccagcttacccggcagcgccggaccgctggtcagctttttgcgcaccacttttttggccgcgcgcagacggcgctgggcgctggagatggccatctccgccagcagctccgcggcctgcacgttctgattcagccacaggctgaaggcgtccttcaccactccggagacgaacgccgcgcactggcgcgacgacaggcgctctttggtttgcccggcgaactgcggatcctgcatcttcaccgacagcacgtaggcgcagcgatcccagatatcttccgctgacagcttcacgccgcgcggcaggatattacggtactcgcagaactcacgcatcgcgtcgagcagcccctgacgcaggccattaacgtgcgtcccgccctgcatagtcgggatcaggttcacgtagctctcggtcagcagctcgccgccttccggcagccacagcagcgcccagtccaccgcctccgtctcgccggagaaggcgccgacgaatggtttttccggcagcagcggcaggccgttcaccgcttcgctcaggtaatcgttcaggccatcggcatagcaccagctctgctcgctgttgttcacctggtcgcggaaaacaatttccacgcccgggcacagcaccgctttcgcttttaacaggtgggtcagacgtgaaacggaaaagcgcgggctgtcgaagaagctttcgtccggccagaaatggacgctggtcccggtattgcgtttgccgcaggtgccggtgacgtgcaggtcttccactttttcaccattttcaaaggcgatgctgtagacctgaccgtcgcgacgcacgttgacctccacgcgttttgacagggcgttgaccaccgagatccccaccccgtgcaggccgccggaaaactgatagtttttattggaaaacttaccgcccgcatgcagccggcagaggatcagctcaaccgccggcacgccctcttccgggtggatgtcgaccggcatcccgcggccatcgtcaatgacctccagggactggtcggcatgaaggataacttccacacgtttggcgtggcctgccagcgcttcatccacactgttatcaataacttcctgaccaagatggttaggacgagtggtgtcggtatacatgcccggacggcggcgcaccggctctagcccggtgagtacctcaatggcatcagcattatatgaagattgcgtcatggtgtgtattcgtaggtcgttcagggccgtttagcgcaggccgagaaattcgataatctgagtgaaatgatcgtcaaagccgacaaatgcgtgattaccgccctcctctaccgtctgccggcaagaggcgtagtaatgcacggcctggcggtaatcaagcacttcatccccggtctgctgcagcagccagagtaaatccggcgcttcgagcgggtcgatttgcatgactttgagatcgtaaatatggcgagactctagcacatattgctgcccggtgtatggattctcattgtggccgagaaaattgtttagtagttcaaacggccgcaccgccgggttaaccaccaccgccggcagcataaagcactgcgaaagccaggtcgcgtagtagccgcccagcgacgaccctacgacccccagcggctcgccgccgtgctccagcacgatggactccaacagctccgccgtttccgccgggtaaggcggcaactccggcaccaccatggtgatctcaggatagtgctgcgccagccaggtctttaacgccgtcgccttcgccgagcgcggagagctgttaaagccatgcagataaaggagcgtcgccatcagtagccttctgaagcaatatccggatgaaacgcggcgccttccaggcggcacacttcggtggtcagcgtcccgtcagggtgaagctccagccagcgccagcccggtgacaccgtatccagagtgaaattggcacagtgcggtttaaactggacgcaggtcgacggcgtcgccatcatgcgccggccattccagtcgagatccagttcctgatgaatatggccgcacaaaagatgcttcacccgcggccaggcgctcaacgcgctgtccagcgcgccggcattgcgcagactatgctgatccagccagctgcagccggccggcagcggatgatggtgcagcaggagtaaggtatagcgctccggcgcctccgccagcttatgttcgagccactccagctggaagtcgctcagctcgccatggggaacgccaaacacctggctgtcgagcagcaggatctgccagcgatcgccgagaaacacgcgcttggcaggggaaatgcccgcctcctgcagggtgctgtacatcgccggctggaaatcatggttgcccggtagccagacgcagggtgcagcaaaactcgcgatgccctcagcaaaatgctgataggccgcggaggagtggtcctgcgccagatcgcctgttgcgacaatcagatcgcatggacgctgtgaggcatgaatggccgacagtacggcctgatagctatcccaggtattgatgcctaacaacgtttcatgcttttcagcaaacaggtgagtatcagtaatttgtaatatcctgactctggcctcaccagccagaggtaggtttaacaggctttccaaatggtgtccttaggtttaacgacgctaacaaaccggaatcgccatcgctccatgtgctaaacagtaacgcagccagtcggccaaaaactggttaatttgatgcttttcgtcgcgttgatgcaactttttattaggataatcatatcgcgctttgaagcgaaagatctgctgactcgaacacacttcggccaccatggcgtcatggtagaggcggacggtcatcgatggcaggctccagtagctcactgcaggcagagtctgctctattgccaccagagtagtgtagcgggtcgattcaactatcgttaaccgatactgcgcgcttcccacctgatagcttaccttctcacccgctgcatccgttcgcggcaacaggcggcgcaactgcgcgaagttggtctcgcacaggcgcatcatctcagggaagtcaggtgtataacgcttcattttgtccactcatttcgtaaattgtgataatgcaattgcagccattgcaaggcgatgacagaggctgcgttgtcgattttcccctcttctacccactggtaagcctgctcccgactcaccacatgcacccgaatatcctcgttttcctcggccaggccgtgaatgccttttgccgtcgatgcatcaacttctcccaccaggatcgataaccgttcgctggtgccgccgggactggccagatagcttaatattggtttcgtccgcccaacttcaagcccggcctcctccagcgcttcccgacgggcaacatcttccaccgtttcacccgcttcaatcatgccggcgaccatctccagcagccacgggctctcgctggtatcataggcggcgatacggatttgttcgaccagcaccacttcgtcgcgcaccgggtcaaagggtagcaagacggcggcgtgcccgcgctcaaaaatttcacgggtgatttcgccactcatgccgccgttaaacaggcggtggcgaaaacggtataaatcgagcgaaaaaaaaccacgatatagcgtttcgcgtgcaataatttctacatcatttttggagaaggtaattccctgctgcgtgggtttgctcattgtcatgtcctgcgaatctgaaattagggatttccaaaccgtttggctaccgttttacggtccgtatgttagattggtgcaaattaccgccggatggcacgtaacgccaactttttacggcggcagaatcgatacaatcagcggaatttttcttagaattagaccagcgctaaatgcttcacaacaaggaatgcaaatgaagaaattgctccccattcttatcggcctgagcctgaccgggttcagcgccatgagccaggcggaaaacctgcttcaggtttaccagcaggcacgcatcagcaaccccgatctgcgtaaatcggcagccgatcgtgacgccgcgttcgaaaagatcaacgaagcgcgcagtccattactgcctcagcttgggctgggagcggattatacctataacaatggctatcgcgacagcaacggcatcaattcaaacgtcaccagcggctcgctgcagttaacgcaggttctgtttgatatgtcgaaatggcgcgccctgacgctgcaggaaaaaacggcagggattcaggatgtcacgtatcagaccgatcagcaaacactgattctgaataccgcgacggcctattttaaagtgctggccgccatcgacacgctctcctataccgaagcgcagaaacaggctatttaccgccagttggatcaaaccacgcagcgctttaacgtaggcctggtggcgatcaccgacgtacagaacgcccgttcacaatacgatgccgtgctggcgaacgaagtcaccgcgcgtaacgatctcgacaacgccgtcgaagaactgcgtcaggtcaccggtaattactatccggagctggcctccctgaacgtgaatggcttcaaaaccaacaagccgcaggcggtcaacgccctgctgaaggaagcggagaaccgcaacctgtcgctgctgcaggcgcgtctgaaccaggacctggctcgcgagcagattcgccaggcgcaggacggccatttgccgacgctcagcctatccgcgtcgagtgggatatcgaatactagctacagtggttcaaaaacccataataatcctcagcaataccaggataacgatgccgggcagaaccaaatcggcctgaacttctctctgccactgtatcagggcggcgcggtgacctcgcaggtcaaacaggcgcaatacaacttcgttggcgccagcgagcagctggaaagcgcccaccgcagcgtcgtgcagactgtgcgttcatcgtttaacaacgtgaacgcctccatcagcagcatcaacgcctacaaacaggcggtggtctctgcgcaaagctccctggatgccatggaagctggctactcggtgggtacgcgtacgatcgttgacgtcctcgacgccaccactacgctgtataacgctaagcagcagctctcgaatgcgcgctacaactacctgatcaacgagctgaacattaagtcggcgttaggtaccctgaacgagcaggatctggtcgccctgaacaacacgctgggtaaacccatctccacctccgcagatagcgtcgcgccggaaaatccgcaacaggatgccaccgctgatggctacggcaacactaccgcggcggtgaagccggcgtccgcacggaccacccagagcagcggcagcaatccgttccgtcagtaattctcatactgtgatgcgcatcgcctgtccgtcggacaggcgatgcgttaaacgtaaggcaacgtaaagatcccccgcttagcgcccctcttcgcttcattttccaccactcatcctctatcctgagcgttaacacacgccataccactgggtcctggaagacaaatatgaaacggacaaaaaatattaatcattcgtcgttccgcaaaagctggagcgcacgccatctgacgccggtcgcgctggccgttaccgcggtctttatgctcgccggttgtgaaaaaagcgacgaaacggtgtcgctgtaccagaacgccgatgactgctccgccgccaacccgggcaaagcagccgaatgcaccacggcctacaccaacgcggtaaaagaggcagagcgcactgcgccgaagtatgccacccgcgaagactgcgtcgccgagtttggcgaaggccagtgccagcagacgccagcccaggcgggcgtcgccccggaaaaccaggcgcaggcgcaaagcagcggcagcttctggatgccgctgatggccggctacatgatgggccgcctgatgggcggcggcatggcgcaacagcagccgctgttcagctcgaaaaatccggccagcccggcctacggtcagtacactgacgccagcggcaagagctatggcgccgcccagccgggccgcaccatgaatgtgccgaaaaccgcgatggcgccgaagccagccaccaccaccaccgtcacccgcggcggctttggcgagtcggtagcgaaacagtcgaccatgcagcgtagcgccgcaggctcaacgtcctcttctcgctcaatgggcggctaagcaacatggaaagagtcagtattaccgagcgcccggactggcgcgagaaagcgaccgagtacggtttcaacttccataccatgtacggcgagccctactggagcgaagaggcgtattacaagctgaccctcgcgcaggtggaaaagctggaagcggtcaccgctgagctacatcagatgtgcctccaggtggtggaaaaagtgatcgccagcgatgagctgatgaccaaattccgcatccctaaacacacctggggttttgtacgtcagtcgtggaaaaccaaccagccgtcgctctactcacgtctcgacctggcctgggatggcgtcggcgaaccgaagctgctggagaacaatgccgacaccccgacctcgctgtatgaagcggccttcttccagtggatctggctggaagatcagctcaacgccggcaagctgccggcgggcagcgaccagttcaacagtttgcaggaaaagctgatcgatcgcttcggcgagctgcgcgagcagtttggctttcagctgctgcatatggcctgctgccgcgataccgttgaagatcgcggtaccgtgcagtatctgcaggactgcgccgctgaagcggggctggcgacggaattcctctacgttgaagatatcggcctgggcgaaaaaggccagtttaccgatctgcaggatcaggtgattggcaatctgttcaagctctatccgtgggagtttatgctgcgggagatgttctccaccaagctggaagacgctggcgtccgctggctggagccggcgtggaaaagcattatctccaacaaggcgctgctgccgatgctgtgggagatgttccccaatcaccctaatctgctggcggcctacttcagcgaagatactcacccggagatggagaagtacgtcattaagccaatcttctcccgcgaaggcgctaacgtgtcgatcgttgaaaatggcaaagtggtggaggcagtagaaggcccgtacggggaagaaggcaccatcgtgcaggcgttttacccgctgccgaagtttggcgatagctatacgctgattggcagctggctcatcaacgaccagcctgcagggatcggtattcgcgaagaccgggcgctgatcacccaggatctgtcgcgcttctatccgcacattttcgtcgaataatgccgcgctccggcgacggtaaatgccgccggagcgcgctatcatcaggcgccaaccaacaccgacagcatgctcagcgagcccatctcgatgccatcgactgggatcgtcatcgcctcaacgccatcccacgtccccaggacatacagcagcggcaggaaatgctccgccgtcgggttggagagcgagcccccttcgtgtgccaggtagttaaccagcgggtgctgctcgtccagcccctgccattgcagattcgccttcacgtagttattgaaggactctgcccaagggtacggcgtgttctcgccatgccagcgggcggtgcgcaggttatgcaccacgttgccgctggccaccagcataatgccttcatcacgcagcgaggccagtttccgccccatttcgagatgccaggccggcggtttggtgctgtcgatgctcaactgaaccatcgggatatccgcctgcggatacattttaatcagcacgccccacgagccatggtcaaatccccaggcttctgtatcgagggtgaccggcaccggcgagagcagctccaccagccgttgcgccagcgccggagagcccggcgccggataatgcgtgtcatacagcgcctgcggaaaaccgccgaagtcatgaatggtcttcggcgcctccatcgccgttacgcccgtaccgcgcgtaaaccagtgcgcagagaccaccacgatcgctttcggacgcggcagggtttcgcccagttgagcccaggcgcgggtataacggttgtcttccagcacgttcattgggctgccatggccgagaaacaacgcgggcattcgggtacgggacatgatgatatccttagggtgtcaatgtgatgtgctcacattacgcgcttttgcgccaggataaactcagataaccatgatgatgatcgtcagaaaatttgaatgtaattcgcggtaaagggacgtgtcccgtacgcgcatcctcaggcaatatactcgtatgtaattattttcacagggagagaagcgatgtcatcacccttaatattgacgctgttagccggtagcgcaaccttcattggcgccatattcggcgtgattggccagaaaccctctaaccgcctgcttggcttctccctcggctttgccgccgggattatgctattgatttcgttgatggaaatgctgcctgccgcgctggccgccgagggcatgtcgccgctgctcggctacggaatgtttgttgtcggcctgctgggctactttggccttgaccgcctgctgccgcacgcccacccgcaggatctgatgactcccgccatgccgcgcccgcgcaacttacgccgcaccgctattcttctgacgctggggatcagcctgcataactttccggaagggatcgccacctatgtcacggccagcaacaacctcgagcttggcatgggcgtcgcccttgccgtcgccctgcacaatattccggaaggactggcggttgccggaccggtgtatgccgccaccggctcgcgcagcaaagcggtgctctgggccgggctttccggcatggcggaaattttgggcggcgtgctggcgtggttgattctggggagcctggtctcgccgctggtgatgggcgcgatcatggctgccgtcgccgggattatggtggcgctgtcggtcgatgaactgatgccgctggcgaaagagatcgatccgcaaagcaatccaagctacggcgtcctgtgcgggatgtcggtcatggggctgagcctggtggtactccagacgatgggcatcggttaaagcgcagaaacaacacagcccactaacaagtgggctgtgctcgggcgtagcgaaccgctatttagctggctttacgctcatgttcgcgacgataggccaccagatcttcaatcgtgactaccgccatattgtgctgctgagcgaacttgatgcactccggcgcgcgggccatggtgccatcgtcattggtcagctcgcacagcacgcctgccggtttaaagccagccagggtcacgaggtcgatagtggcttcggtgtgaccgccgcgggtcagtacgccgcccggctgcgcacgcagcgggaagacgtgacctggacggttaagatcggaaggtttcgcgccgtcggcgatggccgcgcggacggtggtcacgcggtcggcagcggagacgccggtggtcacaccttcggccgcttcgatggtcacggtgaagccggtgccgtaggcgctggtgttgttctctaccatcatcggcagatccagctgtttgcggcgttcttcggtcaggcacaggcacacaatgccgctgccgtgacgaatggtcagcgccatctgctcaacggtcatggtttcagcggcgaagatcatatcgccttcgttttcacggtcttcatcatcaagcaccatcacgccgcggccttcgcgcagggcgttcaaagcgtgttccacacgttcaaaagcggtaccaaaagaagaaaggagcgtctgattcatggtaaaaaaacctcattaaaattatggttaccagaatcagggcagtcttaggagcgccggtttagcggcaaaagtcaacgcgagcgggcctgggcccgactgtgccgttactctctcccatccggactttaaccgtcggccccggaattacaccggatctgctgaccttcccgtagtcacgggaagcgctcgcgggctttcaacgccatggttgatttaccgccggtggggaatttcgccccgccctgagaataagcgagataactataacgctattgactatcctcggcaatgcataagcttcaaacatttctggtttataggcggcctggttcgcactacaatgatcaatcatccgacccgagcaggaaaccaccatgattgacccgaaaaaaattgaacaaatcgcccgccaggtccatgagtcgatgccaaaaggacttcgcgatctgggtgaggatgttgagaagaaaatccgccaggcgctgcagtcgcagctgacccgtctggatctggttagccgcgaagagtttgacgtgcagactcaggtgctgctgcggacccgggaaaaactggcgctgctggagcagcgcctgaatgacctcgaaaaccgcccggcggcgacgccgggcagcgaagagcagcagtaaaaaacgggcccctgggggctcgttttgcgtttggcttaatgggcggcttccgcctggctactcacctggcgacagtacagttcatagcgctggcaaaaccattcacgatgttcttcatccatattgccgacaatggcctgaagatcaactggctggccctgggcgtgcattctggcgaaactccgcgccaaaaaatcaaaattcttcattgaatacatatcgttatggttcatgcgcatactccttcagcggtggatgttctgatcagtcatatgccttttactcacttcagtatttacgcttaccttaacgcgatttgtacgaaaaatgcgcttaacatgattatttattgcgctaaatcattttccacatgattaaataaaaacggcccgcgatacgtctatcgcaggccgtgatgcttcaccgtacaaaccggtgaatagcgaaaagcttatttgtcgctatctttttgtattttcttaataatattggtagttgagcagccatcttcaaagttgagcaccagcacttcgccaccgttcgcccatacctcttcgctgccggcgatttgctccggtttgtagtcgccgcccttgaccagcagatccggcaggatgccagcgatcaggcgctgcggagtatcttcttcgaaggagaccacccagtcgacggcctccagcgcccccagcacgatcatccgctgttccagcgggttcaccgggcgggtttcgcctttcagacgtttggtggaggcatcgctgttgaccgccacgatcagacggtcgcccagcttgcgcgcattcgccagataggagacatgaccggcatgcagaatgtcgaagacgccgttggtcatcaccactttctcgccgcgcttgcgcgccgccgcaaccgcctgtttgagttcctcttcgctcatcacgccaaagccggtctcagcccggccgcggaccgcgttttccagctcgacaggggaaacggtggatgtacccagcttaccgaccaccacgcccgccgcggcgttagcgaaatagcaggcctcttccagggtgttgccggacgccagggtcgccgccagcacgccaatcaccgtgtcgccggcgccggtcacgtcgtacacttcctgggcctgggtcggcatatgcagcggcggacgccccggctgcagcagcgtcatcccctgctcagagcgcgtcaccagcagcgccgacagttcgaattcggcgatgagcttcatgccgcgctcaacgatctgcgcttcatcctggcacttgcccaccaccgcttcaaactcagagaggttcggggtgagcaacgtcgcgccgcgatagcgttcgaaatcggtgcctttcggatcgatcagcaccggcacgcccgcttcacgtgcgagtcggatcatggtctggacgctggtcagcgcccctttggcatagtccgaaaggaccagcgcgccaatagagcccagcgcctgctgaatgcgctcgtgcatcggctgcggatcgacgccggagaagccctcttcaaagtcgaggcggatcagctgttgattgcgcgacagcacccgcagcttggtgatagtcgggtgagtcgggacggagacgaagtcgcacttcacattgacgttggccagcgcctggctcagcgcgcgggcggcgtcatcaatcccggtcaatcccaccaggcgcgaggttgcccccagcgaggcaatgttcatcgctacgtttgccgcgccgccaggacgttcttcgatattttccaccttcaccaccggcaccggggcttccggggaaatacgactggtggggccgtaccagtagcggtccagcatcacatcacccaccaccaacactcctgcacgttcaaactccggcagcgttactttcatgactctctcctgcgagacgcaaactttgcgcgcgataatagcacacccgattttatagttaagccatcagccatttctgccagctggcgctgacctgctcgcgctcccggctgaaggcctctggcgccacgtgtcccggcagctcctgcagggccaggtgatggagcgcgtcacgcaaggtggtgtacgcgtgcgttaaggcgcgcgcttcctcctcgtccatgatgtcgttctgcgccagcagctcgagaatacgcacattatcagaccagcgggtcagcttcggcttgtcgctggcatagcgtaggaccagatactgggtaataaattcaatatccgtgatcccgccggcatcggctttgatatcaaaacgattgggatgcttgttgccgaggtgggcgcgcatcttctcgcgcatctcgcgaacctcggtctgcagggttgcgccctcccgcggggtggtcaggatatcgcgacgaatggcgtcaaagcgcgcctgcaacgccgggtcgccatagaccacacgggcgcgcaccagcgcctgatgctcccacgtccaggcctcgttctgctgatagtcggcaaacgcgtcagcggtggtaaccagcatccccgccgcgccggaagggcgcagccgggcgtccacttcgtagagaataccggacgaggtgcgggtgctgaacagatgcatgatccgctgggccagccgcaggtagaactgacggccgtcaatctcccgctcgccgtcggtcatcacctccgccggacagtcatggaggaacaccaggtcgagatcggagctgtagcccagctcccaaccgccgagcttgccgtagccgacgacggcgaagccgcgcccctggcgatcgtgcaggtgggtcggcaggccgtagcgagccaccatctgcccccatgcctgctgcaccaccgcatcgaggatcgcttcggcaagccaggttaaatggtcgctgaccttcatcaccggtagggtgccggcgatatccgccgccgcgatatgtagctgctgcgcctgcttgaactggcgcaacgcctccagctgctgctcttcatcctcttccggcacccgcagcagatactgacgcagctcgtcgcgataggcatcggtcgccgtcggctgatagagggtgttgggatccagcagctcatccagcagcagcgggtggcgcgccagctggctggcgaccatcggcgatgccgcgcagagcgtaatcaggtgtttcagcgcgccggggaattcgctcagcagttcaagataggtggtgcgggtgacgatcccggtcaacagcggcgtgatccgcgccagaggcagcggcgcatcggcgcgcgagcagatttcgctcagcagatgcggcatcagctgatccagcacctggcggccgcgcgggccgatggtgcgccgatccagctctttgcggaaatcggcaatcagcgccagcacgctgcggcggtcggcgtcgtttaaatgcgccagcgccggactggcgtcatcttcttccagcgcatcctgccacagctcgcgccagtactcggccagctgctcatctggcgactgagcctcgtcatcgccgatcagttcattaaacacccgccgtacgttggccatatggttcgccagctgcgcgctcagcgtctcccagtcatcggtatgcatcccccacgccagtctggcgcggttcagttcatcctgcggcagggtctgggtctgttcatcgttgatactttgcagcaggttttccagccggcgcaggaacagataggccgcgcgcagcagcgtcgcgtcgccttccggcagcagatgcagctcatcaatcgccgccagtgtcggcaatagcgcgcgctgctgcagcgcaggttcgcgaccgccgcggatcagctgaaagacctgaacgataaattcaatttcacgaatgccgccggcgccgagcttgatgttgtctttcagcccgcgacgccgcacttcacgggcgatcatgcctttcatgttacgcagcgactggatcacgctgaagtcgatatagcggcggaagacgaaggggcgaagcatcgcgcgcagttcgctggcgtaggcgccgtcgttatcgcccatgatccgcgctttcaccatcgcgtagcgttcccagtcccgcccctgctcctggtaataatcctccagcgccgcaaagctgagtaccagcggtccgctgtcgccaaagggccgcaggcgcatatccacccgataaacaaagccgtcctgcgtcggctgatccagcgccttgataagccgctgccccaggcgggtaaagaactgggcattatccagctcgcgacggccgccgcgggtggcgccatgctccggccaggcaaagatcagatcgatatcggaagagaagttcagctcgccgccgcccagctttcccatcccgaggatcagcagcggctgcggctgaccctcggcgttgcatggcgttccccactctttacagcaggcggcgtacagccagtcgcgggcggcgacaatcagggtctccgccaggacgctcagctgctgcagcgtctcttcttcgcgcaccagcgacaacgcctgcgcccaggcgatgcggaccatcatctggcggcggaagagacgcagctctcgcatcaaccccgcttcgtcagtgacggcctgcaggcgctcctgcagccaggcttcgtaatgccgccactcttccgccgccggcgcggagtccgcaagctcattcagccagcccggctgagcgatcacaccctgttcgacaaaatcgctgaacgccatcaccgacctggcctgtgggctcagttcggcaacgggaaaatccgttggcagacggtcagcgaccgtctgccagtgctgctgtaactgcggagaaagcggcatcataagggctccctggcctgtaattatcgttttccactatgcagccagaacggctcggcagccagcgcctggcgacggaaatattcaaacacgctgcggtcgtcatgctctatcgcacgctgaagttcctgccagttctccagccagggcgcgacggcgtcgccataggcgcccgccagcagctggacgctgtcgatgtcgcgggacagcttcggcaactggtcagcggcatcttctaccgccagatgctgcacggcgctgcgcagctcggccgccacccgcgagaggtgaatatcggcaaaccgtttgaacgatccggctatttttttctctcccgcctcgttgaggaacgaacgccacccgcgctggaccagccattcggtcagggccagtttggcgccaacgacctcggtgcggaataacgcttcgtcggcggtgtccgcagccagcagaacggcgtcggcgtcgttcagcaacgcgcggaggtgggtggtcgccttacgcggcacgatgccgccaaacagcacgagggcatggcgcacgcgggctatcgccagcagaatttccgctttggcttttgcgttgccgcgcagccagatctcgtcgtgatacagccaatgcaccagggcgctctccagcgccgcctccagcccctgctccacgctggccttcgctgccaccggcagcaccgccagccgggtcaccggacgctcattgttaccttgcgccagatgatacccgcgcgcggctttgctcaggctcccctgacgcaggacgccgctctccagcaaacgatgcgcgaggcgcagcagatcggcggtctccccggcgagcagctccagctccagttcgcagatcggctcctgatgttcgcccgccttgacttcgccgcgatcgagggcaatctcaatctcactctttccttcctggatcacccagcgttcacgggcaaaatcggtgctgaacagcggctggacgtgctccgccagcgcggccggaagttccccttgcggccagacctccgccggcaggcgctcaagcgccagctccggtttatccagtggaatattatattccgggcgctggtgcaggccgccgacctcccgaccggcgattttcagcgtcatctcataacgcccctgatcgccgcggatgcgcagccccatatcgtgacgacgcagccagttatcggcggtttcgtaataaatgttcagcaactggcccgcgggcgtatgtttcgcctcgagcgcattgagctgctcgcgcagcgtctctaccccatcctgagcgacgataaacttgagttcgatttcttgagccatgactgaattcttccgcttctgtgctgcgccgacaaattgcggcgaacttacgacgatattttttgtcagtagatagtattttgcggtgaatcgccatgcaacgcgctttttgccgggccacctcctggatgattccgattgtggcggaaaactttgcgtcgctctggcgatgcctctactatcgttccactttttatgaccaaacgatgacctgatgccaaaattacgcctgattacttttactttgctcgcgcttagcgccgccacggcggttcacgcagaagaaaagcgctacgtttccgatgagctgaacacctgggttcgcagcggcccgggcgataattatcgtctggtcggcaccatcaacgccggggaagaagtgtcggtactgcaaacgaacgacagcaccagttacgcgcaaattcgcgacagcaacggccgtaccgcctggatcccgctgaaagagctgagcaacgagcccagcctgcgcacccgcgtcccggatctggaaaaccaggtcaaaacgctgaccgataagctgaataacatcgatgccacctggaaccagcgcacggcggatatgcagaagaaagtcgccggcagcgacagcgtgattaacgcgctgaaggacgagaaccaaaagttgaaaaacgagctggttgtcgcgcagaagaaggtgaatgcggcaaatctgcagcttgatgataaacagcgcaccattatcatgcagtggtttatgtacggcggcggtgtgctgggcgtcggtctgctgctcggtctggtgctgccacatctggtgccaagccgcaaacgtaaagaccggtggatgaactaattcgtcttctctgccagacttacgtatcatcttgcgaaaaacggatacgggagaatcaggcgtgaagagttatctggtcggtggcgcggtgcgtgacgcgctgttagggctgccggtcaaagaccgagactgggtggtggtgggcgccaccccgcaacagatgctagacgcgggctatcaacaggtaggccgcgattttcccgtgttcctccatccgcaaagccgggaagagtatgccctggcccgcaccgagcgcaaatccggcgcgggctataccggttttacctgctatgccgccccggacgtcaccctcgaagccgatctgctgcgccgcgacctgacggtcaatgccctcgcccaggatgccgacggcgcaattatcgacccctacggcggacagaacgatctccgtcagcgcctgctgcgccatgtctctcccgcgtttagtgaagatccgctgcgcgtgctgcgcgtcgcgcgttttgccgcccgctacgcccacctcggttttcgcattgccgaagagactcaggccctgatggccgcgatggttgaggccggcgagctggcgcatttaacgccggagcgggtgtggaaagagacggaaagcgcattaactactcgcaacccgcaggtctttttccagacgctgcgcgactgtcaggccctcaaggtgctgttcccggagattgacgccctgtacggcgtgccggccccggcgaaatggcatccggaaatcgacaccggcctgcacaccctgatgaccgtcacgatggccgcgatgctgtcgccggatgtcgacgtacgtttcgccaccctgtgccatgacctcggcaaagggctgacgccgaaggcgctctggccgcgtcaccacggccatggtccggcgggagtcaagctggtggagcagctctgcgcgcgtctgcgggtgccgaacgatatccgcgatctcgcgaaactggtggcggagtaccatgacctaatccacaccctgccaattctgcagccgaaaaccctcgtcaaactcttcgacagcattgacgcgtggcgcaaaccgcagcgcgtgcagcagatcgcgctcaccagcgaagccgacgtccgcggacgcaccggtttcgaggccagcgattacccgcagaggcgcctgctgctggaggcctgggaagtggcgcagtcggtctccactaaagaggtcgtggcggcgggctttaaaggggcggaaattcgcgaggagctgacgcggcggagaattgcggcggtagcgcagtggaaggaacagcgttgcccccagccgcaaggctgagggcgcaggccttagaagaagaccacgtacaccgctgccgcgacgataaagcggtagatagcgaacggaatgaacgagatccgtttgatcagctgcaggaaggttttaatcgcaatcagcgccacgataaacgccatcacgaagccgacggcgaacatcgggacgtcgcccatgttcaggaagccgatgctcttgtagacgtccagcacggtggcgcccatcatcatcggtaccgccagcaggaaagagaactccgaggccgcatagcggctgacgcccatcagcatgccgccggagatagtcgcccccgagcgggagaaacctggccacagcgccaggcactgaaagcagccgatgacgaacgcctgacggtaggtcatatcgtcaatcccgaccgcgcgcggctgtttcggcttcagcacttccgctgcaatcagcaatacgccgccgacaatcagggcgtacatcacgttcaccgggttaaacaaggatttaatggtgtcatggaaaatcagccccatcaccaccgcggggatcatgccgagaaggatatggataagcgacaaacggccgctgccctggccttcatgcgccggcggtttcccgaaatggatgccgatcaggccgaacaggcgacgccagaacatcaccaccacggcgagtatcgaacctaactgaatcaccacttcaaaggtatttgcggtatcaccttcaaaccccagcaggtgaccaacaataatcatatgaccggtactggaaacaggtaaaaactctgtcaaaccctcaaccacacccaatattgccgccaccagcagcgagtgtatatcgctcatccaattaaaccctttaaaaaagtaaaatgaaaaaaaccaggaacacggtatcgttcaacaggcacaacccggctgccagagcgcgcgtaatccgcagcgtacaggaagtacacacggattcgtccaccgttctggaaggacatcgccagtaaaattgcctgatgaccggatgctatgaccggtataaacgcaatttgtttaacaagtatgacctgaaaagttttgtttcagattaaggccacgttcaataatcaccccgacgtttgccgcgcgagccacggcgccaggtttgctgacttttatgcgcacccagggcgactggaatgtttccagcagcaggtcggccacctcttccgccacccgctccactaacgcaaattttcccccctccacatgcgcgatcacgcgctcgctgatatcagcatagctgaggcaatcgctgacatcatcgctggcggccgccttgcggttatcccatgcaatttcgatatcgaacaccagcttctgctcaatggtttgttcccagtcataaacaccaatggtggtgattaccgaaagttgctctataaatacaatatccatcacgccctgcctgctttttagctaaaccggataccacttccggcgaattatgcgtattatccacagatgcagagaatacaacgacattttcaaaacggaacagcgttatgagtgcaatcgcgcctggactggtactcctcgcctacctctgcggctccatttccagcgccattctggtatgtcgccttgctggcctgcccgacccacgcgacagcggctcaggcaaccccggggccactaacgtactacgaattggcggaaaaggggcggccgtagcggtacttatttttgatgtgctgaagggcatgctcccggtgtggggcgcctgggcgctgggccttacgccgttctggctggggttagtggcgattgccgcctgcgtgggccatatctggccagtcttctttcatttccgcggcggtaaaggcgtcgccacggccttcggcgctatcgcccccatcgggctcgatctcaccggggtgatggccgggacctggctgctgaccatcctgctcagcggctactcttccctgggcgctatcgtcagcgcgctgatcgccccgttctacgtctggtggttcaaaccgcagtatacctttccggtgtcgatgctctcctgcctgatcctcctgcgccatcacgacaacattcagcgtctgtggcgtcgccaggagagcaaaatctggacccgcgtgaagaagaaaaaaacgccagagcagaagtaatctcccctcccggctccgccagccggggaactcccctgcgctaatcgcgcctttcacccgcccttttacgcttcctcgccatcaaaggcgatcatcgccacatcctccttttgtaacaatacgttagcagcatggaaaggcaaaagttgcgctggcggctggcggcgcggcgcaacgcgatccgccgccttttccgccgcgcccaggctgcggatcaggatattgacggcaaagattatccgggtgaataatccggagcggttatgccgctttcccctcgcgcccgtcgcgacgctccgggttacggatgacataagcgtttcgtatgaccgggataaactcccgccgatcaatactcattgctgctgttttatcttgattttgcaggggcgcaacattgcacggcaccgtgttaccaccactcaaaaaaggctggcaggccacgctggatctccgctttcagcaggccggcggcaagaccgttctcgccagcgcccaacatgtcggcccgctgaccgtccagcgcccgttttacccggaagaagagacctgtcacctctatctgcttcacccgcccggcggcatcgtcggcggtgatgagctgacaattagcgcgcaccttgcccccggctgccatacgctgataaccatgcctggcgccagcaagttttaccgcagcagcggcgcgcaagcgctagttcgccagcagttgacccttgccccgcaggcgaccctggagtggctcccgcaggatgccatcttctttcccggggcgaatgcccggctgttcactacctttcatctttgcgcctccagcaggctgctggcctgggatctgctctgccttggccgcccggtgattggcgaaaccttcagccacggcaccctcagcaaccggctggaggtatgggtggacgatgagccgctgctggtcgagcgcctgcagctgcaggagggagagctctccagcgtcgccgaacgtccctgggtcggcactttgctgtgctatccggctaccgatgccctgctcgacggggtgcgcgacgcgctggcgccgctcggtctctacgccggcgccagcctgaccgaccgcctgctgacggtgcgtttcctcagtgacgataatctgatttgccagcgggtgatgcgcgacgtatggcagtttctgcgccctcatctcaccggtaaatctcccgtacttccccgaatctggctgacttaagagaacgttatggaactgacccccgagaaaaagacaagctgttgctgtttaccgccgcgctggtggcggagcgtcgcctggcccgcggcctgaagctcaactatccggagtccgtggccctgatcagcgcctttattatggaaggcgctcgggacggcaaaagcgtggcctcgctgatggaggaaggccgtcacgtcctgacccgcgagcaggtgatggagggcgtcccggaaatgatcccggatatccaggtcgaagccaccttcccggacggctcgaagctggtcaccgttcacaacccgattatctgaggtagcgccatgatccccggtgaatatcacgttaagcccggtcagatagccctgaataccggccgggcaacctgtcgcgtggtcgttgagaaccacggcgatcggccgattcaggtcggttcgcactaccatttcgccgaggttaacccggcgctgaagttcgaccgtcagcaggccgccggctatcgcctgaatatcccggcgggcacggcggtacgctttgaacccggccagaaacgcgaggtcgagctggtggccttcgctggtcaccgcgccgtcttcggcttccgcggcgaggtcatgggccctctggaggtaaacgatgagtaatatttcacgccaggcctatgccgatatgttcggccccaccgtcggcgacaaggtgcgcctggcggataccgagctgtggatcgaggtggaggacgatttgaccacctacggggaagaggtcaaattcggcggcggcaaagtgatccgcgacggcatgggccaggggcagatgctggccgccgactgtgtcgacctggtgctcaccaacgcgttgatcgtcgatcactgggggatcgttaaggccgatatcggcgtgaaggacggccggatcttcgccatcggcaaagccggcaaccccgacatccagcccaacgtcaccatccccatcggcgccgcgacggaagtaattgccgccgaaggaaaaattgtcaccgccggcgggatcgatacccatattcactggatctgtccgcagcaggcggaagaggcgctggtctccggcgtgaccaccatggtcggcggcggcaccggcccggccgcgggcacccacgccaccacctgtaccccgggcccgtggtatatctcacgcatgctgcaggcggccgacagcctgccggtcaatatcggcctgctgggcaagggcaacgtttctcagccggacgccctgcgcgagcaggtggcggcgggcgtcattggcctgaagatccatgaggactggggcgccaccccggcggcgatcgactgtgcgttaaccgtcgccgatgaaatggacattcaggtcgccctgcacagcgacaccctcaatgaatccggttttgtggaagacaccctcgccgccatcggcggacgcaccatccacaccttccataccgaaggggccggcggcggccatgcgccggacatcatcaccgcctgcgcccatccaaacattttgccgtcgtccaccaacccaacgctgccctacaccctcaacaccatcgatgaacatctcgatatgctgatggtctgccaccatctggacccggacattgccgaggacgtggcctttgccgagtcgcgcattcgccgggaaaccatcgctgcggaagacgtgctgcacgatctcggcgccttctcgctcacctcctccgattcgcaggccatgggccgcgtcggagaagtgattctccgcacctggcaggtggcgcatcgcatgaaggtgcagcgcggcgcgctggcggaggagaccggggataacgacaacttccgcgtgaagcgctacatcgccaaatacaccatcaacccggcgctgacccacggcatcgcacacgaagtcggatccattgaggtgggtaagctggctgacctcgtggtctggtcaccagccttcttcggcgtgaaaccggccaccgtgatcaaaggcggcatgatcgccatcgcgccgatgggcgatatcaatgcctctattccgaccccgcagccggtgcactaccgcccgatgtttggcgcgctgggcagcgcccgccatcactgccgcctcaccttcctgtcgcaggcggcggcagccaatggcgttgccgggcggctgaacctgcgcagcgcgatcgccgtggtgaaaggctgccgtacggtgcagaaagccgacatggtgcacaacagcctgcagcctaacatcaccgtcgacgcccagacctatgaggtgcgggtggatggcgaacttatcaccagcgagccggcagacgttctgccgatggcgcaacgatattttctgttttaaggagagcggatgctttatttaactcaacgtctggagatccccgccgccgtgaccgccagcgttacgctgccgattgatgttcgcgtcaaaagccgggttaaggtcaccctcaacgatggccgggaagccggcctgctgctgccccgcggcctgctgctgcgcggcggcgatgtgctcagcaacgaagaaggcaccgagtttgtgcaggtgattgccgctgatgaaggggtgtcggtagtgcgctgcgacgatccgtttatgctggcgaaggcctgctaccacctcggcaaccgtcacgtgccgctgcagattatgccgggcgagctgcgctaccatcacgatcacgtgctggacgatatgctgcgccagttcggcctgacggtgacctttggccagctgccgttcgagccggaagccggcgcttacgccagcgagagccacggtcatcatcatgctcatcatgaccaccacgctcacagccactagcatgtcgacagcggaacaacgcctgcggctgatgcagctggccagcagcaacctgccggtagggggttacagctggtcccaggggctggagtgggctgtggaagccggctgggtgccggacgtcgcggccttcgagcgctggcagcgacgccagatgacggaaggcttttttaccgttgacctgccgctgttcgcccgcctgtaccgcgcctgcgaacaaggcgatatcgctgcggcccagcgctggaccgcctatctgctggcctgccgggaaactcgtgaactgcgggaggaagagcgcaaccgcggcgcggcgtttgcccgtctgctgagcgactggcagccggactgtccgccgccgtggcgctccctgtgccagcaaagccagctcgccgggatggcctggctcggcgtgcgctggcgtatcgccctgcccgagatggccctcagcctgggctacagctggattgagagcgccgtgatggccggcgtcaagctggtccccttcggccagcaggccgcccagcagctgattttacgtctttgtgaccactacgcggccgagatgccccgcgcgctggccgcgccggacggcgatatcggatcggccaccccgctcgccgccatcgcctctgcccggcatgaaacccaatactctcgattattccgttcctaggagaagccatgaactcttataaacacccgctgcgcgtcggcgtcggcggcccggtcggctccggtaaaaccgctctgctggaagcgctgtgtaaagcgatgcgcgatacctggcagctggcggtggtcactaacgacatctataccaaagaagatcagcgcatcctcaccgaagcgggcgcgctggcgcctgaacgcatcgtcggtgtggaaaccggcggctgcccgcatacggcgatccgcgaagatgcctcaatgaacctcgccgccgtggaagcgctgagtgaaaagttcggtaacctcgaccttatcttcgtggaaagcggcggcgataacctgagcgccaccttcagcccggagctggcggatctgaccatctacgtcatcgatgtggccgaaggggagaagatcccgcgcaaaggcggaccggggatcaccaaatccgattttctggtgatcaataaaaccgaccttgccccctatgtgggcgcgtcgctggaggtgatggcgagcgatacccagcgtatgcgcggcgatcgcccatggaccttcaccaatctgaagcagggcgacggcctgagcaccattatcgccttcctcgaagacaaaggcatgcttggcaaataggcctgttgcaccagccgggcgcaagcgcgtccggatggtgcagcctctgctctctctttatatcatcctgcctccacctccgcgccacgcctgccctgcaatatggcataaggtttgctaattcaagtcatgcctaaccattaaggaatgactatgtcatcactggatcttaaccctgaattacccgcgacaacgcggacttccggctcccgggaaaccttagaagattacaccttacgttacgccccgctgagctttcgccgctggggtccgggcgtcgtcgcggtcaccgcgctgggcggcattgcctatctggccgacttttccatcggcgccagcatcggtatggcctggggcaccagcaacgccatctattcgatcctggtggcggcgctggtgatcttcctcaccggcattccgctggcgatcaccgccgcgcgctacaacattgaccttgacctgatcacccgcagcgccggcttcggctatttcggctcggtgatcaccagcattatttttgccggcttcacctttatcttcttcgccctcgaaggctcgatcatggcccagggcctgctggtgggcctcgggatcccgctgtggatgggatatctgatcgccaccctgatggtgctcccgctggtggtctatggcatgaaagccctgacccgcctgcaggtgtggaccacgccactgtggctggtgctgatggtggtgccggtggtgtggctgattgtcaaagatccgcagctggtggacggcttcctgcatttcgccggtaaaaacagcgcgtcgacggtggatattaccgccatcatgctcggcgccggggtatgcctgtcgctgatcatgcagattggcgagcaaattgattacctgcgctttatgccgcctaagaccgcggagaatcgtaaaagctggtggctggcggtcttttccgccggcccgggctgggtggtgttaggggcgatcaaacagatcatcggcgccttcctcggcttctatctgttgacccgtttcccggcggtgcacaataccgaaccggtgcagcagttcgtcagcgtcttcgataacctggtgcccggctggctggccctgacgctggcggtggtgctggtggtgatctcgcagatcaaaattaacgtcaccaatgcctactccggctcgctggcgtggaccagcgcctggacccgcaccaccaaacgctatccgggacggattatttttgtggtggtcaacctggcgattgccctggcgctgatggagggcgatatgttcagcgccctgtcgtggatcctcggcttttactccaacttcgctatcgcctgggtcgtggtggtggcgaccgacatcacctttaataaaggcttgctcaagctggcgccggcgcagccggagtatcgtcgcggcatgatctacaacgttaacccggtgggcgtggtctcctttggtctggccgccgggctgtcgatctgcgccttcttcggtctgttaggggcgacgctggcgccgttctcgccgctgattgcgctggtcgttgcctttgtcatgaccccgctgatggggctccttacccgcggacgctactatattaagcaggtggatgacggcatcgccgagccgcgctatgacgcggcggggaacgcctccaccaccgcgtatcaatgcgttagctgtgaggaagagtacgagcgcccggacgtgatgcactcgcacaagcatcagggagccatctgctcgctgtgtaaaagtatggagtagtcaggaaggcaggccgacgtgacgtcggcctgtttcaggatgcgttaggcggcaggcagctcggccagcggccagcgcgggcgaaccgtcacgccgagctcggctttggcgccggtttgcagacgcaccatgccggcgtaggcgatcatcgcgccgttgtcagtacagaactcagggcgggcgtagaacacctcgccgccgcgtttttgcatcatctccgccagcttcgcccgcagggtacggttggcgctcacgcctcccgccatcaccagacgcttaaagccggtttgctccagcgcgcggcgacatttaatcatcagcgtatcgacgaccgcatcctcaaacgcccgggcgatgtcggcgcgggtttgctcatcgtcgccgttgctgcgaatggtgttggcggcgaaggtcttcaggccggagaagctgaagtccagccccggacggtcggtcatcggccgcgggaagacaaagcggccttcggtgccctgggacgccattttcgacagcatcggcccgccgggataatccagtcccagcagcttcgccgtcttatcaaaggcttcgcccgccgcatcgtcaatcgactcgcccaacagttcatactgaccaataccggcgacgctaatcaactgggtgtggccgccggaaaccagcagcgcgacgaacgggaacgccggcggattatcttccagcatcggcgccagcagatgcccttccatatggtgtaccgggatcgccggcacgttccaggcgaaggctagcgaccggccaacggtcgccccgaccagcagcgcgccgaccaggcctggacccaccgtataggcgacggcgtcgatatctttcgccgtcagaccggcttctttcagcgccgcctggatcagcggcaccgttttgcgcacgtggtcgcgcgatgccagctccggcaccacgccgccgtaatccgcatgcagtttcacctgactatacaattggttggctaacagaccttgctggtcgtcataaatcgcgatgccggtttcatcgcaggatgtttcaatgcccagtacacgcatgagttgttttacctcgcttcaataccgcgcagtgtaggtccaatgaacggcgatgtaaaactttgctcacccctggtgctctcttcgtgtatactcctcacccttataaaagtccctttcaaaaaaggcgccggtgctttacaaagcagcagtagttgcagtaaaattccgcaccattttgaaataagctggcattgcggccagcggcaaaccgaattaatcaaaggtgagaggcacatgccggtaattaaagtacgtgaaaacgagccgttcgacgtagctctgcgtcgcttcaagcgttcctgcgaaaaagcaggtgttctggcggaagttcgtcgtcgtgagttctatgaaaaaccgactaccgaacgtaagcgcgctaaagcttctgcagtgaaacgtcacgcgaagaaactggctcgcgaaaacgcacgccgtactcgtctgtactaatctgttgagagcgacgctctcaattcagaccgagttgtagttgtaaggccgtgcttccgaaaggaatgcgcggcttattttcgtttatagtcatcagaaataacggggcttatggctggacgaattccacgtgtatttattagcgatctgcttgccagaaccgacatcgtcgatctgatcgatgcgcgggtaaagctgaaaaagcagggcaaaaattttcacgcgtgctgtccgttccataacgaaaaaaccccctctttcaccgtcaacggtgaaaaacagttttaccactgcttcggctgcggggcgcacggcaatgctatcgacttcctgatgaactacgacaagctcgagttcgtggaaacggtcgaagagctggccgccatgcacaacctcgaagtgccttatgaagcaggcaacggacccagccagatagagcgccatcaacggcagaacctctaccagttactggatggtctgaatgcgttttatcaacagtctctgatgcagcccgccgccgatcctgcgcgccagtacctggcgaaacgggggttaagcagcgaggtgattacgcgctttgccatcggctatgctcccccaggttgggataacgttttaaaacggtttggcggcaatcaggaaaaccgccagtcgcttattgatgccggcatgttggtcaccaacgatcagggacgcagttacgaccgcttccgcgaacgggtgatgttccccatccgcgataagcgaggccgggtgattgggtttggcggacgggtgctgggcgatgccctgccgaagtatctgaactccccggaaaccgacatattccataaaggccgccagctgtatggcctgtatgaagcgcagcaggataaccccgaaccaccgcgtttgctggttgtcgaagggtatatggacgtcgtggcgctggcgcagtacgacattaattatgccgtggcctcgctgggtacctcgaccacggccgaccatatccagctgctgttccgggtgacgaataacgtcatctgctgctacgacggcgaccgggccggccgcgatgccgcctggcgcgcgctggagacggcgctgccgtacatgaccgatggtcgccagctacgctttatgtttctgcctgacggcgaagacccggatacgctggtgcgtaaagagggcaaagcggcgttcgaggcgcggatggagcaggctcagccgctctccacgttcttgtttaacagcctgctgccgcaggtcgatctgagtactccggacgggcgcgcgcagctgagcacgctggcgctgccgctgataacccaggtcccgggcgaaacgctgcgcatctatttgcgtcaggagttgggcaataagctgggcattttagatgacgcgcagcttgaacgattaatgccaaaacaggcggaaaatggcgcgccgcgtcccgcaccgcagctaaaacgcacgaccatgcgtatactgataggactgctggtgcaaaacccggatctggcgccgttagtcccgccgctggagggactggactcgcgcaaaatgccgggactgagcctgttcagcgaactggtgaagagctgtctggcgcagcctggtctgacaaccgggcaacttttagagcaatatcgcggcacaaaagaggcggcaacccttgaaaaactgtcgatgtgggacgatatagcagataaagacatcgctgaacaaaccttcaccgactcgctcaaccatatgtttgattcactgctggaactgcgacaggaagagttgatagctcgcgatcgcacacacggtttaagcagtgaagaacgccgggagctctggaccatcagccaggagctggcgaaaaaataaatgacagacaatatccttcacgttgtatcaaagcagtaagaaaacgcagaacaacgtgaaggaaaagtatttaacggcttaagtgccgagtatcgatcgggaagcccccgacagccgcgcagaggcgcagcggcaataatataagtacgccctcgctttaaatgtcgacagcccgtctgccgacaccaatcaaacgaattaagtgtggataccgtcttatggagcaaaacccgcagtcacagctgaagcttcttgtccaacgtggtaaggagcaaggctatctgacctatgccgaggtcaatgaccatctgccggaagatatcgtcgattccgatcagatcgaagacatcatccaaatgatcaacgacatgggtattcaggtgatggaagaagcaccggatgccgatgatctgatgcttgccgaaaacaccgcggatgaagatgctgccgaagccgccgcgcaggtgctctccagcgtggaatccgaaatcgggcgcacgaccgacccggtgcgtatgtacatgcgtgaaatgggtaccgtagagctactgacccgtgaaggcgaaattgacatcgccaaacgcatcgaagacggcatcaatcaggtgcagtgctccgttgccgaatatccggaagcgatcacctacctgcttgagcagtacgaccgcgttgaagcggaagaagcccgtctgtccgatctgatcaccggtttcgtcgatccgaacgccgaagaagatatggcgccaaccgccacccacgttggctccgagctgtctcaggaagagatggatgacgacgaagacgaagacgaagatgaagacgccgacgacaacagcgatgacgacaacagcatcgacccagagctggcccgtgagaaattcgccgagctgcgtacccagtacgagctgacgcgcgacaccatcaaagccaaaggtcgtagccatgccgccgcccaggaagagatcctgaagctgtctgaagtcttcaagcagttccgcctggtgccgaagcagttcgattacctggtcaacagcatgcgcagcatgatggatcgcgttcgtactcaggaacgtatcatcatgaagctgtgcgttgagcagtgcaaaatgccgaagaaaaacttcatcaccctgttcaccggcaacgaaaccagcgaaacctggttcaacgccgcggtggcaatgaacaagccgtggtctgagaagctgctggaagtgaaagaagatgtgcagcgcggcctgcagaagctgcagcagattgaagaagagaccggcctgaccatcgagcaggttaaagatatcaaccgtcgcatgtccatcggcgaagcgaaagcccgtcgtgcgaagaaagagatggttgaagcgaacctgcgtctggttatctctatcgccaagaaatacaccaaccgcggtctgcagttcctcgacctgattcaggaaggcaacatcggtctgatgaaagcggtcgataagttcgaataccgtcgcggctacaagttctcgacctacgccacctggtggatccgtcaggccatcacccgctctatcgcggaccaggcgcgcaccatccgtattccggtgcatatgattgagaccattaacaagctcaaccgtatctcccgtcagatgctgcaggagatgggccgtgaaccgaccccggaagagctggctgagcgtatgctgatgccggaagacaaaatccgtaaagtgctgaagatcgccaaagagcctatctccatggaaacgccgatcggcgacgatgaagattcgcatctgggggatttcatcgaggataccaccctcgagctgccgctggattctgcgaccaccgagagcctgcgcgcggcaacgcatgacgtgctggccggcctcaccgctcgtgaagcgaaagtgctgcgtatgcgtttcggtatcgacatgaacaccgaccacacgctggaagaagtgggtaaacagttcgacgttacccgcgaacgtatccgtcagatcgaagcgaaggcgctgcgtaaactgcgccacccgagtcgttctgaagtgctgcgtagcttcctcgacgattaatcgtcgcggggcatcgtctacagcctgttaaaaagctccctgcggggagctttttttatggcgttcaggtggccatcccgggaaagtcgcctctctccgctactggccgcgggttgccagggcatcgtccagttcacgataggccgccaccagcttatcgagcgtcgcccggtttaagccgctgggattaggcagcacccacacctgggtcgtcccgatggtcatagcctgtttcccccacttcgcgccgcgctggttaaaggccagctcgaaggcctgcttgccgagcaccgccagcgcctgcggctgatactcctcaatcttccgcaccagctcacggccgccgctgcgcagctcctgcaaggcgacctcgctggcctgcaccgtcggacgctctaccagcatggtgatgccgcagcgcgtatccagcagctgcagctcctcttccggcctgagctgccgatcggtgaacccggcctgatggatgaccttccagaagcgattgccaggatgggcaaaatgaaagccggtatgggcggaggacttccccgggttgataccgcaaaagacaacgcgcaggcccggcgcaaggatatcgctaatcatgttttctccggctgtatggctaaaacatgattataaaggattgaaaatgcattgtttataaaaacagcagctgcgcgctttacgctggattgcaatcgccagttactttataatccctcgccacggccccttagctcagtggttagagcaggcgactcataatcgcttggtcgttggttcaaacccaacaggggccaccaaattttagatttaaaatcatataattaagccactcgaaagagtggcttttttgttcctgaattttaaaatggcaccacaaaccgctgagcagcgcgcatggcttagcgtgttgtcgctatcccattaagaggataaaaagtccgttataacgcagggaaaatttgcgcttacgctaaaacagatagcattctgccttagcaaaatattgctcagagcatctcgggcagcccataaccgccgcactcctgttgacttctgtctaactacgcaacgtagtcttaaaatatctttcattcctgcaatgctggaattcatactactcacgataaatgtaacaacacaggtcaatttccgaataataaccatagcctgcgccagctgttcgaaatcaacgcgttcctccccccgctcttatatataacccgctgacttacaaaaaggatgaaatgatgaaaatacgggatatatcaatcagtacctgtctggcactgttattaatgggttgcgtagctaaaccacccatggcgacggaaaatgaaatgaaagaggccgccgcgtttgcttttaatgtcgatgcttcgcaggtgacaatttccgatgcgaggcagcaggatgtgaaaaccaactttgtggtcaccatcggcaaaaccagccatcgctgctatgtgacgaaggccgccgagccgaagctttacgggctgatcccgctgggcggcggtagcaccgtctcggatgccatctgcgccggcgccaacccgacgctagcgagcaaaacctgcgacgccctgtcgcaaaaagcgggccgctgctgagcctttgcgcagaagaaggccgctaactgcgcatttagtcactttttctgccgttttaccgcggtcgcttagttcagcgaccgcacctgctgataagaattgagccgttcccgcagcgaggtgagccagacatccggctcctgacggcagatttcggtgaggatcggcgtcagcaccagctcggcttcatggaagtcggtccactccggcggctccagtgaaaaaggatcgttcatcagccaaatcaccatcggcgtccaggcgcgcggatccagttgcagataatcctgacagcgcatcatatctcgggtccgcgcctcatcggggtcgacatcctttcccaccgcggcgctactcattgccagtactgttattcctgccatcagatgtttccaaacccattttcgccagaaggcgcgtttttctttcgccattgttattattttacctgccagttgtcgccggacgatattccgagaactcaccttaataagagcagattaatcgtttgcattttttttaacagcagaccgcgctgaagcaagtgaacgcccgttcctacagctgtcatccagctatgcaaatatattcgtctggctcagctccacaatatttccctggcccaaaacgatttgtgttacaattacgccttataacggcatcgataaaaataacccccgccgcacctgcaccaggcatcgcccttcttttttcatatcaggatttacgcccccatgaatgcgataatcattgacgatcatccattggcacgtatcgccattcgcaaccttctcgacagcaacggtattaccgtcgcggcagagctcgacagcggcgctcatgccgtgcagaccgcggaaagcatgcagcctgacctgctcatcgtcgacgtcgatattccggagctcagcggtatcgaggtgctggagcagctgcgcaaacgccgctaccagggaacaatcatcatcatttccgctaagaatgaactgttctacggcaaacgcagcgccgactgcggagcaaatggttttgtgagtaaaaaagagggaatgaataatatcctcgccgcaatcgacgcagccaataatggctacagctatttccccttttcactggaacgcttctgcacccacggcatcaccgatcaggaccggctggatacgctgtcaacgcaggagatgaaggtgttccgctatattctcagcggcgtcgactacaccaccatcggcagcaaaatgaatatcagcaataaaacggtaagtacctataaggtccgtctgatggataaattaggctgcagcaccctgcttgagctatatgactttgcgcaacgcaataaaatagggtgatggcatggcggttcgtcttattttatccgtcgttgtcgggctggcgctgagcctctcgcctgccgcgtatgccatgaaacagctggagctgaagagccattctcatatcgcggcgatcgatatcccgcttagcggtaaggagaaagcatggctggcggcgcagcctacgctgaccgtcgggacctggcttcccgagaggacgcccatcgtctatgacggcgacgagaaaagttatcagggcattaacgccgactatctggcgctgatggcgcacagcctcggactgaaggtgattatccgccagtatgacaccgagcagcaggcgctcaccgccctggccgaccgtcaggtggataccctgctcactcaggtggcgcaccgggatgcgctcgccccgggcctggatcaatccgcgccgctgcttaaaacctggccgacgctggtcacctcgctgaaatcccctctgccgccgctgaccactgaccgccgcgtcacgctggcctgcacccgcgattgcgcttttttcgatattattcagcaggcgtttcccaacgccaaaatcaccctttatgatagcgactatcaggctctcgcctcggtggtcagcggcgagaatcagtattttatcggcaacaacatcaccactggccactgcatctcgaaatatttctcgcaatcgctggttatcgcgcactattttcgtcagcaggagcaacacaaccgctttgtcacccgtgacgatcggccagagctgcatcaactcttcgaccgttttatccatgccgtcgacagcgacaccgcgatgcggatcatgcaaaactggctcaaccgtggcgatctgtcgtttctcaataccccgcttacctttagccccgaagagcagcgctggctgcagaagcatcgtcgcgtccgcctgctggtgaacccctattttccgccatttaccctggtggataacgaggatgaactgcgcggcatcatggccgatatgctgaatattgtctcactccagaccggcctgcagtttgaccccattctggtgcgcaaccgtcaggctctggcaaagcgcatggaaaaagaggactgggcgatcatgcccgccgccaccctgaccccacagccgcaggcctacgtcaccctcagcgatccgctcattaacgtggcctttgtgctggtcgcccgcggcagcgcccccgaccagcatctgctgacgcgctcggcgcggatcgccctgccggtcgggcctatcgccgcccatgatctgaaagcgcgttttccgctgattaactgggtggaaacggataacgttggcgtcgccatgaagatggtagaggaaggcgaagtggatgccgccgtagcctcggagctttccgcccgctatatgatcgaccactactatccacagggtctgcactacacccgcattgatggactccccgtcgcggccattcggctggccatcccgcgcgatgaaccggtgctggccgccattcttaacaaagcgctgcaggttattccgccacgggatattctgcagatgaccgagaagtggtcgaaaatctccagtcagcaaatagagaactggagccagtacagccgccagttttaccagctgatcgcctttgcgctggtgctgatcgccatcagcctcggctggggactctccctgtgtcgggaagtgcgcaaacgtaaagactcccagcagcggctcgaggaggagctggcgcagaaggaggccctctcctgtgcgctggagcgcgaaaaagacaaagcgattcaggcgacaaaagccaagagccgctttctggccagcatgagccacgagctgcgcacgccggtgagcgccatcgtcggctttctggagctgctggcgaaacctgagctgaacgtcggccagcgtaaagaggcgatcgagctggcggggtcgacggcgcaaaccctgctgggacttatcggcaatattcttgatatcgacaagattgaatcgggaaaataccaggttaccccgcagtggagcgatgtcgcacagttagtgtcgcagcagtgtcataccttcgacgcgctggcgcagcaaaagggcatcgatctgcactaccataacgcgctgcaggaaggtaccatgctgtgggtcgacccgcaggcgctacggcaaatcctcaataatctcatcggcaatgcgctgaagtttaccgtcgaaggcgcaattcaggtctcctgccggctgacgccggcgaatgagacacagggagagctggccctcatggttagcgacagcggctgcgggatcagtgaagcagagcaggccaccctcttccaccgctatgcccaggcgcgccagggacgacagcagaccggctccggactggggctggtcatttgcaaagagctggttgcgctgatgcagggtcgcctggagatggtcagccgtccgggcgtggggaccactttcaccatcacgctgccggtcaaggcgagccgctgcgcgatccacgcgccgcaggcgtcgcccgccagaccgcaggctctacccgggctggcgatactgatagcggacgatcaccccaccaaccggctactgctcaagcgccagctcagcactatcggctatagcgtcgatgaagcctgcgacggtgaagaggcagagaataagctcgccagcaaacattacgatctgctgataacggacctcaatatgccgaagaaagatggcctggcgctggcggcctcgctacgccgtcgctatccgggcctggtaatttggggcgtgactgccagcgcgctgccgcagtcgcgggaggcgtgtctggccagcggcatgaatatgtgtctgtttaagccggtgtcggtccagacgctgagtcatgagctcagccgtttagcggtgggccgcgcatcacctcacgctacccggcacctgaagctcagcgtgctgagcgagaatacggggggagaccaggcgctgatgaatgagatgctggagacgttccgcgatgcgtcggccgcggatttacaggctgccggacaggcaatcgcccggcatgagccgcagacctttctgcgggcgctgcaccgcctgcacggttcagcacaaattctggggattactgcgctacaacaactgtgcgccccttttgaggcaaagcggcctgattcgctgacgccggcaagctgtctggaggtggtacagcgcatcaccggcgtcatgcgcgagatcgatggcgaaatcgacgccctgatcggccgctagccgttccgctcgggcagtccgcctgcccgagcgttaaggggacatccttgtcagttttttcctctgcgctctctcagggtggaacaagtatcagttgcctgccaccagcatctcgctatccaccacaatgccctcttcagcgcccttcagcaccagattcgcttcgtaatatttaccggctttcagcagttcttgcgcctgcgctaccgccttacgggtctggttaagcggcatcagatactggttctcaatcaccccaataccggccaggcgcagggtatcgatagcccctttctgatcgcctttcgccagcttttcgttggcggattggatagcgctctctttttccggcgtggccacatagtcttcagacagggcgatagaggcgttaatgatcacatagcgatcggcgatcattttggctttagcatcagttttcacaaacttcgcccagctggcatcatcggcggccagcagcgcggcggcgtcgtctgtcagttttttggcgctatccggctggccatggaacagcgccagacgggcgaactggatgtcgcgcatcgcattcgcgccctgcaccgccacctgcagcacatcggcggcttctttctgtacctgcgtcgtggctgccgcggctggcgcggctggcgctgccgtcgcgctatctgttgcccataccggagaggtactcatcatggttgccagcaggctcgccagaatgacttttttcatcgttgactcctgattaaaatcggtaagcatcaccaaacgcagccagcttaaaaaatatcgcgggcattgagaatcagagcccggaagtaatattgcgggcctggtctgacagctgtcagaccaggcgtataaagtggcctcggcgctcttatttacgcctgccgatcgcgcggcctactattttcctcagacctttcttttggcccgctgaataaaccctcacgctttttattcagcgtcaggccgccaaccgggatctgcggagcaattatgtttatgtttagccattacaccttaaatgcgtttagcccacgcgtcttcattcgatataaacggcatgcctgcctgatggcggtattgctgtttatctgcggagcctgttgtctggcctggccgttggtcgccggctggtatctcgccacagtaaccggcatgttattgatgatctgcggcttctattcgctgtacagcctgattgtcttccgccagcagcactggaaatcacgcctggtggcgctgatcttcgccatcgcctggatcgtgctcggcctgagctttgtcgtcaatcccctcaacggtatgagcagtctggccattttatttggctttttatttgttctcggcggtatttcccgcatcgttaacggatgtcaaacccgcaaacaaagcggcgctggctggaatatttttatcggcctgttggatttacttatcgcctgcctgtggctggccatgaacccgcagcaaagctggttatttattaccgcctttatcggcgttgaaatgatatttagcgccatcggcttgttggtcctgcgcaataaaatgaagcacgctgaggcttaagccctattttgacactggagaagaaaatgaatttacctaaagcactcgtattgaccgtggcggctaccacattctgtctgatgaccagcccggcgttcgcggttgaggaaaccacgccgcagaatatgacctgtcaggaatttatggatatgaacccaaaaagcatgaccccggtggccttctgggtagtgaatcgcaacaccgactttagcggcggcgactatgttgactggcatgaagtcgagaccgtttcggtaccgaaaatgctgcaggagtgccacaagaaccccgccgctaaacttggcgatctcagcgcggtcatcaaaaaataacccccccggcatcaggccggggaaacccgccgcgctgcggcgggtcccgctttactcatcgataccgcattcgcacggcagatggcggccgataagcttgcgatacaaaaacgccccgataatcgcccccaccaccggcgccagcagcggcaccagaaagtaagggatcgctaggccaccggtaaaagcgatcgagccccacccggccagactggtaaacagttttgggccgaagtcgcgcgccggattcagcgcaaagccggttagcggccccatcgacgcgccgatcacggcgatcagcaagccaatcagcaacggcgccagcggcccgcgcggaattccgttgccgtcgtcggtcagggccatgatcatcgccatcaggattgccgtgatggtggtctccacggcaaacgcttgtataaaagtgatatgtggatgcgggtacgtggaaaagaccccggccaggttaagactggcggcagtgccgcgcacgatatgctgactctgttcaagatcgagaaacagctggcgatagagcccatacaccagcgcggcggcgcagaaggccccggccgtctgggcaacaataaacggcagcaccttgcggcgttcaaaacaggcgaacagccacagggcaatggtcaccgccggattaaggtgcgcgccggagacaccggccgtcaggtagatggccatggcgacgccaaggccccagataatactgatctcccactgaccaaagctggccccggcgacccgcagcgcagcgacgcagcccgcgccgaagaaaatgagcaatccggtgccaagaaactcggccacgcactgcccggttaaggtagaagtctggttcattatcggcatcctgaaatagcacgttaaagagagaggctggcgcgagcgcccgtttaattcgcctgaccggccagtagcagcccggtggcgaccgcattgcgcggcccttctgttccccgaatattgccctgcccggcgaccacgccatagtgcgacaaggcttccgtgataagctgcgggatctcaaagtccagcgatgagccgcccaccagcaccacaaaggcgatatcgcgaatggaaccgccgggtgagacctggcgcagcgcgcgcaggcagttggtgacaaacactttctctttcgcctgccggcgcacgagacgaattttttccagcgggctggcgttatcgatcggcaccagttcgccctccttgatgtacaccactttggcgaacaccgccgggctgagggcttcccgaaagaactccaccgcgccattctcgtgacgaatactgaacaggctttccactttggccagcgggtatttttttatcgcttccgccagcgaaagatcctcgaggcccagctcggttttaatcaacaggctgaccatattccccgccccggcgagatggaccgccgttatctgcccctccgcgttgacgatcgccgcatccgtcgagccggcgccgaggtcgaggatcgccagcggcgccgcacagccgggagtggttaacgccccggcgatggccatgttggcctccacgccgcccaccaccacctcggtctgcagtcgggcgctcagttcgcgggcgatgacctgcatttgcagacgatccgctttcaccatcgccgccatcccgacggcattttccatggcgcactcgccggccatcccgccctgcaccttgcgcggaataaacgtatccaccgccagcagatcctggatgtatatcgcgctcatctcatggccggtcagggacgccattaccttgcgcacccgctcaagcatgccgccggcgtgagtgcccggttcgccgcggatgtcgcgtaccggagcgcaggcgctcatcgcctgcatgatggcttccgcgccctcggcgacatcggcctctccgcggcgcttttcgccgctaatgtagaggttgcccgccgggatcacccgcgactgcacgtccccctgcggggtcttgagcaccaccgcggaacggttgccaatcagggcgcgggcgatggggacgatggcctgggtctcttccgggcttagcccgaagaaggtggcgatcccgtagggattcgacaggatccgcaccacctggcccggcgcggccacttccaccgccgccatcaccccctcggggacctgctccagcagcgtcacttcatctaccaccggcagggttttacgcaggcggttgttcaccagcacgccgtcgtcctttttgaggatcgccgccaccacgttgatcccccggtcgagcgcctcattgagccaccacacggcgtcaaggaaatcgacggcgtcgtcaatcagtacgatccacccctcggcatactgcgccgccggcagcgtcgccagccgcccgagggcgatagtcgtccccacgccaacgcccaccccgcccggcgtctgcgggttatgaccgatcatggtcgattcggtgataatggtctcggtgatggtctccatcgccacatcgccaatcaccggcgcggcttcgttaagatagatgcgagagacatcgctcatcgaccacggtgttttcgccagggcctgctccagcgcggcgagggtcccggcgatattgtcccgcgtccctttcatgcccgtcgtcgcgacgatcccgctggcaacaaacgccctcgcctgcgggtcatcggacgccagcgccacctcggtggtggcgttgccgatatcaatcccggctattaacggcatgctgacctccgcttagcttcctttacgcagcttatgccgctgctgatacacttccgccgactcccggacaaaggcggcattcactgtcgcatgccaggtgtgctccagctcgtcggcgatcgccagcagctccgcctgcgaggagcggaacgggcgcagcgcgttatagatagccagaatgcgctcgtcaggaatggcgataagctccgccgcgcggcggaaattgcgcgccaccgcatggcgctgcatctgctcggcaatctgcgcctggtactcaagggtctggcgggagatccgcacatcctgcgggcccacctcgccagagagcaccttctcgagggtaatatcggtcaatggtttaccggtaggcgtcaggatatgctccgggcagcgggtggctaacggataatcctgcacgcgcatggttttctcgctcatggtcactcccttactaagtcgacgtgcagggtgacgggctcggcgtcctgcaccacatgtttggtctctttgatatgaaatagcgcggctttggccataaatttcggccgcaccatctgatcgttcaccaccggcaccggcgaaggtgactctttgcgcgcatagcgcgcggcgtttttgccaatctgccggtaggtctccagcgtcagcagcggcgcctgggagaacagctccaggttgctgagcggcagcagatcgcgctgatggatgaccgtggtccccttcgactggataccgatgccgatccccgagccgctcaggttggccgcatcccaggccataaaggagacgtcggacgtgcgcagaatgcgcaccacccgggcgtgaagcccctcttcttccaccccggcaatcagctctttgaggatcgcgccatggggcatatcgatcagagtgtgatgctggtgtttatcgaaggcagggccgacgccgatcaccacttcatcggcgcgttcatcggcagaagctaccccgccctcgcgggttttcagggtaaaagagggctgaatttgggttgtctgttgcacaggaataccgccttattcaatggtgtcgggctgaaccacgcccggaatatttttgatctccgcccagcgttcggcagagatgcgatagccggtgcccggcccctgatagtcattgatgtcgttgaccgcactcaccacctcgaactgccgatcgagaatggccgaggtctgcaggtaatcgccggtgacccgctggcgcagcatattgagaatattgctggcgatatcctcaaagccgctgcggctcagcgcgccgacaatatcgaggccggtgatgttgcgcttcatcatctcttccaccgcactcagatcctccaccacgttacgcggcggcatctcgttgctgccgtgcgcgtaggtggcggcctccacctcctcgtcggcgattggcggcagccccagctcgcggaaaaccgcctggatcgcccgcgccgctttctggcgaatggcaatggtttccgcctcggtcaccggacgcaggccgccgtcaaccatcaggtcacgctgcaggatgttgtaatcatcaaaatcttccgcatcgaagttcgagccggcgaacatgttgtcgtagttcggcaccgcgctgtagccggagaaaataaagtcggtgcccggcagcatctgcatcagggtgcgcgcggtgcggcgaatatccgagtgggagaaagtctggtcgttggcggacgccacttcgaggtcgagcatagaggcgatcaggttttccgccagcaccgcccgaatgcccgacggcacagcgccggtcatgccgatacagctcaccgcgccgttttgcagcccctgaaccccggcgcctttggtaatgaagatgcagcgcgattcgaggtagagcatcgacttgctctccgaatagcccatcagcgcttcggatccggtgccggaggtgtagcgcattttcaacccgcgggaggcgtaggccgaggcgaggaacgcctttgaccacggcgtatcatcgccgtcggtaaataccgcttccgtgccgtagaccgacaccgtctcggcgtagctggttaagccacgcatgcccagctccagctcggtggcctcttccaccgagcactgcgtcaacacgccggggcggccgcactgcgaaccgaccaacagcgccagggcgttaaacggcgcgtagcgcgcgataccgaccgtggtctcctgttctgagaagccgcggatcccggcctcggcggcgtcagcggcaatctgcaccggattatctttgagattggtgacgtggcactggttggagggggtccggcgggcacgcatcttctgcagcgccatcatcatctccaccacgttcatctgcgccatcacctcgaccgctttggccggcgtgatggcggtagtgatggcaatgatctcctcccggctgacgtgaatatccaccagcatacgggctatttccaccgcctccaggcgcattgcctgctctgtgcgctcaacgttgatcgcgtaatcggcgataaaccggtcgatcatgtcaaactggtcccggcgtttgccgtccagttcgacgatcagaccgttgtccacttttactgaagagaccgggtcaaaggggctgtccatggcgatcagcccctcttcaggccactcgccaatcagcccgtcctgattgacggggcgctgggccagtactgcaaatcgttttgatcttttcattgttcatcggctcaaaaggtgaaatccgcagacggtagcgaatacgccgggccagcgtcgttgccgcccggccattaccggcaatagcggaactttaaatgagccagtggtgaaaaaaataaatttaatttcgtttcaatttggcacacgaaatctaccgacagtttcactatgaaactttactccgccggcaaaaataaaaaatgtgatcgcccgcaatgatataaatcaattaataaaaaacgcccttaattacgttttgccgacgctattttaaccctattgactaaatcatggcgggcgacaaaataacgctgactaaaataaagcaagccaaccgaatggtaatagttttttactatcgccccctactgactattcgcgccagcgttaccctggtgcgggagagaatgatgaacaagagccaacaagttcagacaatcaccctggccgccgcccagcaaatggcggcggcggtggaaaaaaaagccactgagatcaacgtggcggtggtgttttccgtagttgaccgcggaggcaacacgctgcttatccagcggatggacgaggccttcgtctccagctgcgatatttccctgaataaagcctggagcgcctgcagcctgaagcaaggtacccatgaaattacgtcagcggtccagccaggacaatctctgtacggtctgcagctaaccaaccaacagcgaattattatttttggcggcggcctgccagttatttttaatgagcaggtaattggcgccgtcggcgttagcggcggtacggtcgagcaggatcaattattagcccagtgcgccctggattgtttttccgcattataacctgaagcgagaaggtatattatgagctatcgtatgtttgattatctggtgccaaacgttaacttttttggccccaacgccatttctgtagtcggcgaacgctgccagctgctgggggggaaaaaagccctgctggtcaccgacaaaggcctgcgggcaattaaagatggcgcggtggacaaaaccctgcattatctgcgggaggccgggatcgaggtggcgatctttgacggcgtcgagccgaacccgaaagacaccaacgtgcgcgacggcctcgccgtgtttcgccgcgaacagtgcgacatcatcgtcaccgtgggcggcggcagcccgcacgattgcggcaaaggcatcggcatcgccgccacccatgagggcgatctgtaccagtatgccggaatcgagaccctgaccaacccgctgccgcctatcgtcgcggtcaataccaccgccggcaccgccagcgaggtcacccgccactgcgtcctgaccaacaccgaaaccaaagtgaagtttgtgatcgtcagctggcgcaacctgccgtcggtctctatcaacgatccgctgctgatgatcggtaaaccggccgccctgaccgcggcgaccgggatggatgccctgacccacgccgtagaggcctatatctccaaagacgctaacccggtgacggacgccgccgccatgcaggcgatccgcctcatcgcccgcaacctgcgccaggccgtggccctcggcagcaatctgcaggcgcgggaaaacatggcctatgcctctctgctggccgggatggctttcaataacgccaacctcggctacgtgcacgccatggcgcaccagctgggcggcctgtacgacatgccgcacggcgtggccaacgctgtcctgctgccgcatgtggcccgctacaacctgatcgccaacccggagaaattcgccgatatcgctgaactgatgggcgaaaatatcaccggactgtccaccctcgacgcggcggaaaaagccatcgccgctatcacgcgtctgtcgatggatatcggtattccgcagcatctgcgcgatctgggggtaaaagaggccgacttcccctacatggcggagatggctctgaaagacggcaatgcgttctcgaacccgcgtaaaggcaacgagcaggagattgccgcgattttccgccaggcattctgagtgttaacgaggggaccgtcatgtcgctttcaccgccaggcgtacgcctgttttacgatccgcgcgggcaccacgccggcgccatcaatgagctgtgctgggggctggaggagcagggggtcccctgccagactataacctatgacggaggcggtgacgccgctgcgctgggcgccctggcggccagaagctcgcccctgcgggtgggtatcgggctcagcgcgtccggcgagatagccctcactcatgcccagctgccggcggacgcgccgttggctaccggacacgtcaccgatagcgacgatcatctgcgtacgctcggcgccaacgccgggcagctggttaaagtcctgccgttaagtgagagaaactgaatgtatcgtatctatacccgcaccggggataaaggcaccaccgccctgtacggcggcagccgcatcgagaaagaccatattcgcgtcgaggcctacggtaccgtcgatgaactgatatcccagctgggcgtctgctacgccacgacccgcgacgccgggctgcgggaaagcctgcaccatattcagcagacgctgttcgtgctgggggctgaactggccagcgatgcgcggggcctgacccgcctgagccagacgatcggcgaagaggagatcaccgccctggagcggcttatcgaccgcaatatggccgagagcggcccgttaaaacagttcgtgatcccggggaggaatctcgcctctgcccagctgcacgtggcgcgcacccagtcccgtcggctcgaacgcctgctgacggccatggaccgcgcgcatccgctgcgcgacgcgctcaaacgctacagcaatcgcctgtcggatgccctgttctccatggcgcgtatcgaggagactaggcctgatgcttgcgcttgaactggctggcgtcaatatcgtactgcttcattttgcgccacagggtggtgcggccaatattgagcagctgcgacatctcctgcacccgcccgctggtcacccgggcggcgtgaataatagcttccttttcgatggcgctaaaagtcaggctggccggcagcagcgatgacgcgctatccccgcccggccgctcggaaaagagatattccggcagattactcaggcgaatgtggccgttgtcgctgctgatggcgatattctcaatgacgctattgagctcaaaatcattccccggccacgagtaggccaccagctgcgccagcgcgtcatcgtccactttcagtcgcgaagagaaacgcttctccaggctcttcaaccggttatgcaccagcgacggaatactgttgcgtcgggcgcgcagcggcgggatgacgatctcaaaggagtgaagcgcatagtacagctggcggctaaagcggttctgttccaccagattggccagatcgacggtggtggtggcaatcaccttcacatccaccgggatcaggcgccgggcgtcgaggcgggtgagcacgccctgcttaatcacctgcagcagagccgactgcagctccggcgccagatactcgatcttttccagaaacagggtgccgccgttggccagctcaaggcggctcaggcgaccattttcatcgtcggtaggggcgctgcccataaagtcctggcccagcacgctgtcggcatatagctggcagttgacggcgatataggggccgcccgcccgttcgctttcattgtggatagcctggctcagcagctctttcccaaccccctcttcaccgcacagcagcaccgggaagccaccgcgcgccgcctggcggccaaagtggatcaggcgtcgggtttccggatcgtcggcagacatctgttcaaaggtgtggctgactttaccgagctggctggtcatcagctgccgcatctgctccaccgggtgcagcagcagaataaaactgttgccttgcgcctcgacaatcggttttaaggtgatcaccgcgtcgacaaactgatgctgactttcaaaggtgacttcgacgtgattcaggccgcgggcgtgtttgatggcgcggcgcagcagcgccgggagggtcaccagatcggcgatatttttcccctggctggcctgaacatcaagatgcagcagtctcgccgcctgaacattgagaaactgcagcacgccctgttcgttccacgccatcaccccatcgtccatgctctccagcaggccgtacatctgattgaggtggcggttggattccgccagcaggctgtcggtaagcagggagttacccacctcgcgggcgatggccagcgtcagggagaggtcggcgctggactggtgctcgaccagacagcaaagcgagatagagccgaacagccgcccgtggttatcaaacaccggcgtcgagcaaaaactccatggctgtagcgcctgcttaaaatgccgatcgccggcggtgttgatcggctggccctgcatcgcggccagcgacagcgcgcaggtgccgataatgctctccgcgcagtagctgccgtcgcgaaatcccagggcagccagctgggccagggtttgcggctcgccgcaacggctgaggatgcaggcagactcatcaagaataaacagcgcgcaggggcggccgtccataaactcccaggcgtcttccagcgccgcctggccgatggtcagcagcgcggttttacgccgacagatggagtcgaaggtcaggccctgggcctggtgcggcgtttgccaggtttcgcgctgcataaacttgctgcagcggtgccatgactgggcgatgacggaagagaccgccttcccggtatcctgagtctgaacagtcatatccttttccgcgttgtaccatagagaacccctccggcagcgactgccggaggggagaaagaaaaaccgctgacctgggccagcggtttagccaccgcgaattaacgcgccagccactgctggcctaacagatcggcggtgaggatagcggcatggacgctctccggggtcaccgcaaacggcatattatggatggtttccccttccgcgcaggtggctttcgccaccgcggcgattttctcgtcgatcccctctttgacgcccatctgcgcgagcgtcaccggcaggccgacgcgctggcagaagcccagcaccgtttcaatctcgtccatcgggctgttctgcagcaccagctgcgccagggtaccgaaggccactttctcaccgtgatacagatggtggcactcttcaagaatggtgaaaccgttgtggattgcatgggcagcggccaggccactgctttcaaagccaatgccgctgagataagtgttcgcctcgatgatgcgctccagcgcttcggtcactaccccggcctgcgccgccagacgggccttttcgccctccgccagcagcgtatcatagcacaggcgggcgaggctcaacgccgcctcggtggactgtcctccggccatgctggtggcgcgcgcatcgtagcaagctttggcctcgaaccaggtggagagcgcatcgcccatgccggagaccagcaggcgtaccggcgctttggcgataatcgccgtgtccatcaccaccatatccgggtttttcggatagatcagatactcttcaaactcgcccgcttcggtgtagatcaccgacagcgcgctggttggcgcatcggtcgaggcgatggtcgggatcaccaccaccggcagcttctggtagtaaccgatcgccttcgcggtatcgagggttttaccaccgccgatcccgaccacgccgcggcagccctgtttttgcaaaatcgccatcagacggttgatttccgcatggctgcattcgccgttaaaccgttccgcatggcagcgaatatcgtggctctgcaggccattcaccactttctctcccgccagcttcattacgaaatcgtcggcgatgacgaagaagctctccgccaggtttttggcatattgaccgaacagaacagcagcatcaggaccctgaagatatttggctggagattgaataacttttagcattcctttcaccctcaaataagtgcgcatgtagacatgatgagccctggcgttatccgcgccggccagtgaagcgcggcctgaacggagcgtaccggagcagtgcgatcactgtagggccggcagggaacaaaaaaatctttcgcctttttgttctgatatgaaacacaggttaattttttacgttccatattggaacaaaaaaccctaatctctgtcaggattgcgatcccgatccgctcctttgccgcataatgcccttacaatcctccgtgtttgaccgccttttctcccgcagtcggcagaaaatcagcaaaaaattttttcccacccgcttcgccggctatcctgaccgccgcttatggcagaagaaaaaaagcgcgccagctcgcattttcaccatatcctcagcaaaaacgttccataaagaaacaaaacaaggaggcaatgtttcgtaatgaaacccgatcgtcggggcattctttttttcgtccgctcagccagaatcatcatatcgccaggcacgctccaccgtcagacgatacccctacgcgatgaccgcctccgccagcagagaggcggcatcgaaccttctccaacggagcactgaataatgaaaaagctgattaaccgtgttgaagatgtactgaatgaacaattacaggggctggctaaagcccatccgcagctgaccctgcatcaggacccgctgtatgtgacccgcaccgacgcgccggtggctggcaaggtggccctgctctccggcggcggcagcggacatgaaccgatgcactgcggctatatcggccagggcatgctctccggcgcctgtccgggggaaatcttcacctcgccgacgccggacaaaatgtttgaatgcgcgatgcaaattgacggcggcgaaggcgtcttgctaattatcaaaaactataccggcgacatcctgaattttgagaccgccaccgagctgctgcatgagagcggcattaaagtcaccaccgtggtggtcgacgacgacgtggcagtgaaagacagcctctataccgccggtcgtcgcggcgttgccaacaccgtactgatcgaaaaactggtcggcgccgccgccgagcgcggcgactcgctggaagcctgcgctgaactgggccgccgcctgaacaatctcggccactcgattggtatcgccctcggcgcctgcaccgtaccggctgccgggcaaccctcctttacgctgaaagatgacgagatggagttcggcgtcggcattcacggcgagccgggcatcgaccgccgccgcttcagctcgctggaccaaaccgtcgatgagatgttcgataccctgctggaaaacggcgcttacagccgcacgctgcgccagtgggataccgtcaagggcgcgtggcaggaagtgcagcagagcaaaaccgcgctgcaaaacggcgaccgggttatcgcgctggttaataacctcggcgccactccgctttccgaactgtatggcgtgtataaccgcctcgcccagcgctgcgaagcgtccggcatcatcatcgaacgcaacctcatcggcagctactgtacttcgctggatatggcgggcttctccatcactctgctgaaagtggatgacgagacgctgacgctatgggacgccccggttcacaccccggcgctgaactggggaaactaaggagcacgacatgtcactgaacagaacgcaaatcgtcgactggctgtaccgctgcggcgatattttcaccaaagagagcgattttctcaccggcctcgataaagagattggcgacgccgaccacggtctcaatatgcaccgcggtttcagtaaagtggtcgaaaagctgccgtcgattgccgataaagatattggctttatcctcaaaaacaccggcatgacgctgctctccaacgtcggcggtgccagcggcccgctgttcggcaccttcttcattcgcgccgcgcaggtgacccaggcccaccagagcctgacgctcgacgagctgtacctgatgatccgcgaaggtgcggacggtgtcgtcaaccgcggcaaagcggagccaggggataaaaccatgtgcgacgtctggctgccggtggtggactccctgcgccagtccagcgagcagcacctgtcgatcgccgccgcgctggatgccgcctgcgaagtggccgagcgtgcggcccacgccaccatcactatgcaggcgcgtaaaggccgcgccagctatctcggcgagcgcagcatcggacatcaggatcccggcgcgacctcggtgctgtttatggttcagatgctggccgccgccgccaaagagtaaggaaattgcgatggtaaacctggttattgtttctcatagcgcccggctgggcgaaggtgtcggagaactggcccggcagatgttaatcaacgatggctgcaaactggcgatcgccgccgggatcgacgatcccgacagcccgatcggcaccgatccgcttaaagtcatggaggcgatcgaatccgtggccgataccgatcacgtgctggtgatgatggatatcggcagcgcgttgctcagcgccgaaaccgccctcgatctgctcgatccggcgattgccgcgaaggtgcgactgtgcgccgcgccgctggtggaagggacgctggcggccaccgtcagcgctgcctccggcgcggggatcgacaaggtgatcgccgacgccatgagcgccctggaggccaagcgggttcagctgggtttaccttcgccaacttctgacgccgcgccggcgccgatgcttgccgacgacggcgacacaaaatcggtgtcagtcattattaacaatcataacggcctgcacgtgcgtccggcgtcgaagctggtcgccgcgctggcgggctttaacgccgatctgctgctggagaaaaacgggaagtgcgtcaaaccggacagcctcaaccaaatcgcgctattgcaggtccgccgcaacgataagctgcgcctgctggcccgcggtccggatgccgacgcggcgctggcggcgtttcaggcgctggccgccgataacttcggtgaatcgcctgcggcgcaaccggcagcggctccggcaacgcccgagcgcgtcgaaggcgctgccctgcgctatccgctggccctgatccagccgctccgcccggctgccgccgatgccgcccgcgagcagcagcgcctgcgccaggccattgaccagacgctggcggatcttatcgccctgaccgagctggcggaaaataaatttcacgccgatatcgcggcgatcttcgccgggcaccacaccctgctcgacgatgacgatctgtttgatgccgccaacgatcgtctgctcaccgaacaatgcacggcggaatgggcatggcatcaggtgttgatggagctcagccagcagtatcgccagctggatgacccctacctgcaggcgcgctatatcgatatcgaagatattttgcagcgcaccctgcgccatctgcagggcgttcaggagagagtgccgacgcccggcgagccaacaattattattgccgacaacatttatccctcaaccgtcttacagctggatgccagcttcgttaaaggcctgtgcctgcgcgatggcagcgaacaggctcacggcgcgattatcgcccgcgcggcggggatcgcctggctgagccagcagggcgaggcgctgaacagcgtgcagcccggcgagactatcgtgctcgatatgcgccaccagcgccttatccgtgactaaaattcacgttgaccgttaccgctccgggggcctgcctccggagggtgagttttcgcttactcttcaggaaccactatgtctcaattcttttttaaccagcgcgccagcctcgtcaacgatgtgattgagggtaccattatcgccagcccgtggaataacctcgcccgtctggagagcgacccggcgatccgggtggtggtccgtcgcgatctgaataaaaacaacgtggcggtgatctccggcggcggcgccggccatgaaccggcgcacgtcggctttattggtaaaggcatgctgaccgccgcggtctgcggcgatctgttcgcctcgccgagcgtcgacgcggtgctcaccgccattcaggcagtgaccggcgaggcgggctgcctgctgatcgtcaaaaactacaccggcgatcggcttaacttcggtctggcggcggagaaagcgcgccgactcggctacaacgtggagatgctgatcgtcggcgacgatatttcgctgccggataacaaacagccgcgcggcatcgccgggaccattctggtgcataaagtggctggctatttcgccgagcgcggcttcaacctcgccaccgtcctgcgcgaagcgcaatacgccgccagccataccgccagcatcggggtggcgctggccagctgccacctgccgcaggaagccgacagcgcgccgcgccatcaggccggtcacgccgagctgggaatgggcatccacggtgagccgggcgcctcgacgatcgccacgcaaaacagtgcggagatcgttaacctgatggtggaaaaactgaccgccgccctaccggaaaccggccgcctggcggtgatgctcaataacctcggcggcgtgtcggtggctgagatggcgattctgacccgcgagctggccaacaccccgctgcaggcgcgcattgactggttaataggcccggcctcgctggtgacggcgctggatatgaaaggcttctcgctgaccaccatcgtgctggaggagagtattgagaaagcgctgctttcggatgtggaaaccgccagctggcagaagccggtgcagccgcggactatcaacgtcgtgccgtccaccctcgacagcgcccgggtggattttacgccctcggccaacccacaggtgggcgattacgtggcgcaggtgaccggcgccctcatcgatcttgaagaacatctcaacgcgctggatgccaaagtaggcgacggcgataccggctccaccttcgccgccggggcgcgcgagattgccgagcggctcgagcgtcagcagctgcccctgaacgatctgccaacgctcttcgcgctgatcggcgaacgcctgacggtggtgatgggcggctccagcggggtattgatgtctatcttcttcaccgctgccgggcagaagctggggcaaggcgccagcgtggccgaggcgctgaacgccggtctggaacagatgaagttttacggcggcgccgatgagggagaccggacgatgatcgacgctctgcagccggccctggcggcgctgctggccgaaccggagaatctgcaggccgctttcgccgcggcgcaggccggggcggatcgcacctgccagtcaagcaaagccggcgccggacgcgcgtcctatctcaacagcgatagcctgctcggcaacatggaccccggcgcccacgcggtggcgatggtgtttaaggcgctggcggaacgctaagccttccccggtggcgctgcgcttatcggggcgatgtaacaccgccgaatagcaggtcgggtaaggcgtaagccgccacccgacaaaaaacggcaccgccggtagcccggataaggcgcgacgcgccgctatccgggttttaccacgatggctttttacttgctgtgccagtacgcctgggaacgcaccagctgctgatcgatgctctcgtcttcaaagcgcgccagcagcgatttcaccaccgcgccttcgccggtcagccagataaaataatcctccgccggcaccttcacctgcgccagacgctcggcgacgaaggccggattgtggcccaccacccactcgatgttaaagccgtcgagatccgccagataatctttatacgacgcatcggcgatagtaacgatggccgtcacctgcggcctcgccggcagctggcgtaatcccagcagacgacggcgcagcgccggcatgccggactcatcgcaaacatacagctgccaggcataatcttccggcaccaccagcgagccacgcgggccgccgatcaccagcttatcgcccacttttgcttccagcgcccaacggctggcgataccgccatcgtggatatagaaatcgtaagccagctcgtgacgttcggcatcgtacagcggcgtatagtcgcgggtggcaggccgcacgccttccccccagtcaatcccctcctcggtcacctgcggcggggtaaatgccgcgcccggctcggggaaaaaaagcttggtatggtcgtcaaagccgtgagaggcgaagccttccagcgcctcgcctcccagcacgatacgctggaacgccgcgcctgcgcgctccacgcgcagcaccgtcagctcacggaaacgcagctcattgcggacacgctgcgggtacttgtctgctttggtttttgtcatcatcgattgccttcgtgaacggtaaatagatatatctaaacttgatgcaaatgataatgattgccaactaataagaatgcaagtctttttttgatatagtcaaaacaaaccgcatcaaaatccacagtcagaaaataattttatatatatcaatatattaaaaaataaatagcaaccagcattgcgaacattcattttttagatataaattagatatatcaaaacagcaggaggtaaccatgcgacatcatcatgaagaagggcgtgggccacgcgggcgccacggtgaccctagcgaacacggcgaccatggccgccgcggcggcggacgtcgccagcgtttctttggccacggcgaactgcggctgatcattctggatatcctcagccgcagcgccagccatggctatgagctgatcaaagagatcgaaacgcttacccaggggaactacagccccagcccgggggtgatctatccgacgctggatctgctccaggaccagggccttatcagcgtggaagacgacaacggacgcaagaaaatccttatcagcgaggaaggaaaacagctgcacgccgagaaccaggagcacctggcccatatccaggagcgcctgcaggcgcggatggtcggctgcgagctgcgccgcgatccgcagatgaagcgcgcgctggaaaacttcaaagcggtcctcgacctgaaagtgaaccagcaggccagcagtgccgcccagctcaagcagatcatcggcattattgaccgggcggcgatggagatctctcagctcgactaagcctcttttttcatcaccggctgccccgcgctggggcagctcgcaccacggcggatcgccccgtctattgccgccaggcagaaaatctcgtcagctcaggaataaaacgtgccaatagtggcgcaatgagattaaattttacacaattcgtcttttactttgcatttatcccgattttcaccgcttctgccgaactggcgtaatccctgcaatacttaatccagtatcgtgtgatacgtccgccccaggagcacattttgaacaggttaccttccagcgcatcggctctggcctgcagcgcacacgcactgaatctcattgaaaagcgcacgcttgatcatgaggaaatgaaagcacttaaccaggaggtcagggaatactttaaagagcatgtgaatccggggtttttagagtatcgaaaatcggtcacagccggcggggattacggagccgtagagtggcaagcgggagggttaaatacgcttgtcgacacccagggacaggagtttatcgactgccttggtgggtttggcatcttcaatgtagggcaccgtaatccagttgtggtatccgccgtcgagaatcaactcgcgaaacaaccgcttcacagtcaggagctgctggacccgctacgcgcgatgctggcgaaaaccctggcagccttaacgcccgggaaactaaagtacagtttcttctgcaacagcggtaccgaatcggtagaggcggccatcaagctggcgaaagcctatcagtcgccgcgcggtaaatttaccttcatcgccaccagcggcgccttccacggtaaatcgctgggcgcgctgtcggccaccgccaagtcgaccttccgcaaaccctttatgccgctgctgccgggcttccgccacgtgccgttcggcgatatcaacgccatgcgcaccatgctgagcgagtgcaagaaaaccggcgacgacgtcgcggcggtgatcctcgagccgattcagggcgaagggggcgtgatcctcccgccaacggggtatttgccggcggtgcgtaaactgtgcgacgagtttggcgcattgctgatcctcgacgaagtgcagaccggcatgggccgcaccggcaagatgttcgcctgcgagcatgagaacgtccagccggacattctgtgtctggcgaaagcgctcggcggcggtgtgatgccgatcggcgcgacggtggcgacggaagaggtcttctcggtgctcttcgataacccgttcctgcacaccaccaccttcggcggcaacccgttggcctgtgcggcggcgctggcgacgatcaacgtgctgctgacgcaaaacctgccggcgcaggcggcgcagaaaggcgatatgctgctggacggtttccgcctgctggcgcaggagtatccggacctggtgaatgaagtgcgcgggaaaggcatgctgatggctatcgagtttgttgataacgagattggctacgactttgccagcgagatgttcagacagcgggtgctggtcgccgggacgttaaacaacgccaagacgatccgcattgaaccaccgctgacgctcacccttgagcagtgcgaacaggtgctgaaggcggcgcgcaaggcgctggcggccctgcgcgtttcggttgaagaagcgtaataaagtgtccttcaccctctccctctgagagggtgaaggataaccctcacacctgcggtaacaggccgataaagctgcgcttctgccgcggctgcgacatcatctcctccagcttttcgacgcaggctaaatagtgcggcgtcttcttatgcgccagcaccgcctcatcgtctttataggcttcgtagataaaaaagcgggttttcacctcaggatcctgcaggacatcaaagcgcaggttgcctggctcctgtagcgcgccctcgtggttggcgcgaaacacctcgagaaactcatccacccgctcgggtttaatattgatttccaccagcgtgacgttcatttcagctctccctgtttttcttcctgccagaactgatacgcttcgcgcgcgttcagattctcatgcaccacctttttcaccgccttcagcatcgcgcgcggggcgctggactggaagatattgcgccccatatccaccccggaagccccctggtcgatcgcccgccagcacatctccagcgcctcatgctccggcagttttttaccgccggcgataacgatcggcaccggacagctggcggtcactttttcaaagccttcctcaacgaaataggtcttcacaaactgcgcccccatttcggcggcaatccggctggccagcgagaagtagcgcgcatcgcgggtcatctctttgccgacgccggtaaccgccaggaccggcataccgtagcgattgccggcgtccaccagtttgatgatgttattgatcgactgatgttcgtattcgctgccgatatagacctgcgccgccaccgcgcatacgttgagccgcagcgcgtcttccatcgccaccgccacgcattcgttggagagttcgctcaaaatcgaattgccgccggaggcgcggagcaccaccggcttattggtggccgccggtacctggctgcgcagtacgccgcgggtgcacatcagcacgtcggtgtcggcaaacagcggcgcaatcgacaggtcgatacgctcaagcccggtcgttggcccctggaagtagccgtgatcgaaggccagcatcaccgtgcggttgctgtgcggattaaaaatgcgcgccagccgcgactgcatgccccaatccagcgagccgcagcctttcagggtatacagcgtattctgctgcgggcggtcgatgccgaagtccttcccctctttgatatcgtctaaatctgccatctcatcctccgtcagaagtcgtagttgttgatgttctctttgctgaacaccacgcgctccggcagcagcacgataccgttgcccttcgcctcatactgatagccctgcacgctgttcggttcgaccttcagcgaaccgatatctttcacctcaacgctgtcgcctacgttaagatcgccctttttcagtaatcgatcggcgacgttaaccgcaattttgccctgctgaaccacatcccacaggccgaacgctttcaccgtgccgcgctcaacgtacggacgcatcacgttcggcgtactaaagccgacaatcgccacgccctgacgcttgaggttctctgccgcctgcgccgccgccggcagcgcattggcatccggcgcgataatggcgtcgagatccggataggcttttaagatcccctcggcggtttgtagcgatttggtggcatcgttatagccaaactgggtggtgacgatttgccactgcggatgttctttttcgattttggctttggcttccttcacccactggttctggtcggtcaccgtcgggctggagtagaaaaacgctaccttggcagtaggcttcgtcacctgcttttccgccatctcgaccagcaggccgccaagctgctgcggcgtgccctgattgatatagatgctgcggcactccggcctggtatcggaatcccaggtcaggactttcaccccgcgctgcatcgcccgcttcagcgccggacacaggccgtccggcgagacagcggaaacgataatcgcgttgtagccctggttgacgaagttgttgataagctgcacctggccggagacgctgggctcggttgggccgtcataggtgacatccacgcccagcgctttccccgcctctttcgcgccgttgccgccgctggtaaagaagccgacgccgaccagcttaggaataaaggcgatgcggtccgccgccttcgcggtaaccacgctcatcgccagcgccagcacgatcagttttaatttcattttatgctccgattgttttatgcgagaaaagacgccgccaggtcgcgcgcacccattcacggtgcaggctcagcgaacgccccatcaccaccacaaccaacagcgcccctgacagcgcgctcgacacctggttggggatgccgaccatctgtaaaccctgttgcagataccccaccagcaatgccgccagcgcggaacccagtatcgatcccgagccgccgtaaatattggccccgccgagcaccgccgcggtcagcgccggcatcagcaggtcgcggcctaaatccgaacgtgccgagccgaagtaggaaaccatcaccagcgccgcgaccgccgaggcgacgccaaccaggccatacagcacgtacgggatgccgttcaccgacagcgcggcatagcgcgcggcgcgcgggttttgcccgagtaaaaagaggtggcggccaaagcgcccgcgatgggtcagcagccagaagaaaaaggtgataatcgcgaacagcaccagcggcagcggcagtccggcgagggttaaattggcgaaggcggtgaagctatcgggaaaaccgccaatcccctcgtaaccggtcgcgccggccatcccggaaagcagcagcgcgccgccgccgtacagatacagcgtaccaagcgtgatcaccagcgggctgatgccggtgtagtggatcagcgcggcgttgaataacccgcacagcagtcccaagagcaacgtcagcgataccgcgagccacagcggccagcccgcctgggtcatcaccccgagggcgatggcgcacaggccgatggtcgagcccagcgaaatatcgatcccgccgctgatgatcaccagcgtcagcggcagcgcgacgatgccgatgcagataaagtcgctggtgctaaagagcagcatattgagatccagcatgcgcggattcagcgcgccgaacagcaggatctccacgatcagcaacgccagcagcgcgctttcccagttaagcttcagcttcatttaagccacctctttgcttttgcgttcgggaaagcgggcaacctgtttcccccctttgttacccggctggaaacggctgtactttagcgcccgctgatggcgggccagcgcctggcgcaggcggccatcgagcaccagcacgccgagcagcaccaggccggcgataaagtcattccaccaggcgggaaggcggaacagcaccagtacggtgtcgatttgggtaaggaaaaaggcgccgagaaacgcgccgagcagcgtaccggtaccgccaagcagcgagatcccgcccagtacgcaggcggcgatggctttcatctccaggccgctgccggtctgattaggcacaaaaccaatctgcgcggcgaagacgatcccggcgcaggccgccagcataccgttgagggtaaaggccagcatccgcgtgcggttgaccgccacgcccagctggcgcgcggcggcgaggttatcgccaacggcgtaaaaatcacgaccaaaggcggtgcgcgacagcagccagccgcccgccagcagcagcgccagcaccagccagcccagcggcgacacgccgataaacgcaggctccgagagcgatttcaggctgtctggcaagccctcgatccatttcccgccggtccacagcagcattaccccgcgatacaaccccagcgtgccgagcgtcgcgacgatcgccggaatgcgcagccccaccaccagcaggccgttaaacgccccggccagcgcgccaatagccagcgcgaaggcgatggccgtcgccaacccgtagccgttgttcagcgccacgccgacggcgatggcgcatagcccaacggtggagcctaccgacacgtcaatattgcgggtcagcatcaccagggtcgcgcccaatgccagcaggcagaggatttgcgagctggcgaaaatcatcgccagggtctgcaggctgaaataggccggattgagcgccaccagcacaacaaagagcgccacgatggcaaagaaggcgctcagttcgcgattcttgagtaacgttttcatgcctgccctccgaaggccagggtcatcatgcgatcgacggtcaccgcctgccgcgccagctcgccgctgtagcggccctgatgcatcaccagcacccggtcggccaggccgatgaactcatccagatcggaggagatcatcagcactgccacattttgcgcggcgacgcttttcagcagctgatagatatcggcgcgggcggagacatccacgccgcgcgtcggctcatcgacaattagcagcagcgggttggcctccagacagcgcgccagcagcaccttctgctggttaccgccagagagagtgcgcaccggctgatcgccatcggccagcttgatccccagcgcccggtgatagcgctcaaccaccgccgcctcccgtttcccctgctgccaccacgacggctgattgaacatcaccgtgttccagcgcaccggcgcatcaagaaacagccccgagacctggcggtcttccggcagatagaccagcccgctggccagccgggcgcgggtgctgtcattgctaatctcgcgattctccagccagatcagcccggcgcgcggtggacgcaggccgtataaggtttcggcaaattcggtgcgcccggatcccaccagcccggcgaggccgacgatctccccggcgcggatctccagattgagatcgataaagccttctccggtaagatcctccacccgcagcacgggaaaatcctgcgcctgggtgcggcggttgcccggcagcgccagccacagcttttgcgtgtcgctcagcgtatggtcgcggctggccggcgtcatagcgctaatcagttgctcatcgcggtaagttgcggtctcgccgctcagcactaccgccccgtcgcgcatcaccgaaatatggctggcaagctggcggatttcgggcagtttgtgcgagataaacacgatccccacgtccagcgcctgtaacgcgcggatctggctaaacaacctctccgtttcgcccggggttaaagaggcggtgggttcatcaaggatcaggatccgcgcttcgcgcatcaggccgcgcaggatctcgaccatctgttgatcggctacctcgagcgtgctggcgctggcatcgaggttgatctggcagttcagctgctgcagtttttcctgcagtcgcgcggcggtatccgcccgcttcggcaaacgaaagagaatgttctcgcgcacgctgaggttgggaaacagcatcggctcctgcggcaccagataaatgcccagctggtgggccagcgccgggctgaggcgcgcaaacgcgcggtcgccgatcgtcagctcaccgctatccggggtttcgacgccggcgatgatcttcatcagcgtcgatttacccgcgccattgcctcccatcagggcatgcacctggcccgcgcatagcgtaaagtcgatgcccttcagcacggcaacgccggagaactgtttgcggatctggcgagcttcaagcagtggcttcatcgtcgcgcctcgtttgaacaaatgatttttaaatttaataatgttcaaaagcgtagacggtgaactatatttacaaccgtgcgaagatcacagtttggcgctttagatcctcaggaaaaaatgggccagcgatgaaagatccgttttgccagtcggctcacactttccggccgcgcaatagcgaacatatgatctaaatttttataagagttcaatttatgagcgaaaaacgcattacggaagagaaccgctacgccgggctggcgttagccgaggaagagctggtggcgcgggtggcgtggtgctactaccacgacggcctgacgcaaaatgacatcggcgagcgtttggggctgccgcggctgaagatttcccgcctgctggagaaaggccgccagtccggggtgatccgcgtgcagatcaactcgcgctatgagggctgtctggcgctggaaagtgaactccagcagcgttttggcctcaagattgcccgcgtactgccggcgctcaacaccccgccgatgaatacccggctggggatcggcgcggcgcagtcgctgatgggcattctgcagccgggacagctgctggcggtcggcttcggcgaagccaccatgagctgcctgcagcatctcagcggctttatcggctcgcagcaggtgcggctggtgaccctctccggcggcgtcggcccgtatatgaccggtattggccagctggatgccgcctgcagcgtcagcattatcccggcgccgctgcgggtctcttcggcggaggtcgccgagatcctgcgccgcgagtcgagcgtgcgcgacgtgatcctcgcggcgacggcggcggacgcggcggtggttggcatcggcgccatcgatcagcggcgcgacgccaccattttacgctccggctatatcagcgagggcgaacagctgatgtacgcccgcaaaggcgcggtcggcgacattttaggttatttcctgcaggccgacggcaggccggtagaaggactggagatccatcgggaactgctcggcgtgacccttgatgagctagcgcagctgccgaccatcgttggcgtcgccgggggagaagaaaaagcgcaggcgatttatgccgctctgattggcaagcgcattaatggcctggtaacggaagagacaacagcacgcgcggtgcttaccctggcctcctgacggcctggcgccgcgcgacaacagcgaggcgcatgtcatgagttacctgttagcgttagatgccgggaccggcagcattcgggcggttattttcgatcttaatggccgccagctggcggtaggccaggccgaatggaaacacctgagcgttgataacgtccccggctcgatggagttcgaccttaccaccaactggcagctggcctgccagtgcattcgccaggcgctcgacgccgcccggctctctgccgccgatattcagtccgtcgcctgctgttcgatgcgcgaaggcatcgttctctatgaccgcaacggcgaggccatctgggcctgcgccaacgtcgatgcccgcgccagccgcgaagtggcggagcttaaggagatccacgactatcgcttcgaatccgaggtatacgaggtctcgggacaaaccctggcgctcagcgccatgccgcgcctgctgtggctggcgcaccaccgccccgatatctaccgcaaagcggcaaccatcaccatgatcagcgactggctggcggcgaagctttccggcgagctgtcggtcgacccgtcaaacgccggcaccaccggcatgctcgatctgttcagccgcgactggcgtccggcgctgctggatatggccgggctgcgcgccgatatgctgtcgccggtcaaagagaccggtaccctgctgggcgccgtcaccgaagcggcggcgcagcagagcggcctgcgcgccgggacgccggtggtgatgggcggcggcgacgtccagctcggctgcctgggccttggggtggtgcgcgccgggcaaaccgcggtactcggcggcactttctggcagcaggtggtcaacctgccgcaggtgcgcaccgatccgcagatgaatattcgcgttaatcctcacgtgattcccggcatggcgcaggcggaatcgatcagcttctttaccggcctgaccatgcgctggtttcgcgacgccttctgcgctgaagaaaaactgattgccgagcggctcggcgtcgatgcctattcgctgctggaggagatggccagccgcgtccccgccggttcccacggcgtgatgcctattttttccgacgctatgcactttaagcagtggtaccacgccgcgccgtcgtttattaacctctccatcgatccggaaaagtgcaataaagcgaccctgttccgcgcgctggaggagaacgcggcgattgtctccgcctgcaacctcgcgcagatctcgcagttctccggggtgacattcgacagcctggtgtttgccggcggcggctctaaaggcgcgctgtggagccagatcctcagcgacgtcaccggcctgccggtgcgggtgccggtggtccgcgaagccaccgctctgggctgcgccatcgccgccggaaccggcgccgggatgtatgacgatatggccagcaccggagagcggttagtgagctggcaccgcgagttcaccccaaatccgcagcatcgcgagctgtatcaggagatgatgagcaaatggcagacggtgtacgccgatcagcttggccttgtcgatagcggactgacaacgtcgatgtggcaggcgccgggtctggagcgccgccagcgcgttgtgtcttccccctcaccctaactaccggtgccgctccgcctttcccccctctccctttgggagagggccggggtgtggggcaacgcttcgccgttctttgaatcccatcacaatcaccgcactccccttttccctttttctccacgatggctaaattagtaactcatccgaccacataacaataattttacattggaagccactatgagccgctatccgtcgcttttcgccccgcttgagctgggcttcacaacgctcaaaaaccgcgtgttgatgggctcaatgcacaccgggctggaagagctgccggacggcgcgcagcggctggcggccttttacgccgagcgcgcccgtcacggcgtggcgctgatcgtcaccggcggcatcgctccggcgccctctggcgtcaccatggccggcggcgcggtactcaacgacgccagccatctggcgcatcatcgccatattaccgatgcggtacatcaggaaggcggcaaaatcgctctgcagatcctgcacaccggccgttacagctaccagcccgcgctggtggccccctcggcgctacaggcgccgatcaaccgttttaccccccatgaactgagccacgatgagatcctgacgctgatcgatgattttgcccactgcgcccagctggcgcgcgaagcgggctatgacggcgtcgaggtgatgggctctgagggctatctgattaacgaatttctcgccgcgcgcactaaccagcgcgacgaccaatggggcggcgattatgccaggcgcatgcgtttcgccgtagaggtggttaaggcggtgcgccagcgcgccggccacgatttcattatcatttaccgtctgtcgatgctcgatctggtcaacgacggcagcacgctggcggaagtcaccgaactggccaaagcgattgaagcggcgggagcgaccatcatcaacaccgggattggctggcacgaagcgcgcattccgaccatcgccacgccggtaccgcgcggagctttcagctgggtcacccgcaagctgaagggcgcggtgtcgatcccgttgatcaccaccaaccgcattaacgatccgcaggtcgcggaggatattctcgcccgcggcgatgccgatatggtatcgatggcccgcccgttccttgccgacgccgaatttatatcaaaagcgcaggacgatcgcgccgatcagatcaacacctgcatcggctgcaatcaggcgtgtctcgatcggatcttcgtcggcaaagtcacctcctgtctggtcaacccgcgcgcgtgtcatgaaaccctgatgccggtcctgccggccaacgcgcctaaacggctggcggtggtcggcgccgggcctgccggtctggccttcgccgtaaacgctgccgcccgcggtcatcacgtcacgttgtttgatgcgctcccggagatcggcggtcagtttaatatcgccaaacagatccccggcaaagaggagtttcacgagacgctgcgttactaccgcaccatgctcgatcttcatggtgtcgatctacgcctgaacacccgcgtcacgacagacgatctgctggcgttcgatgagacgatcctcgccaccggtatcgccccgcgcctgccggcgatcgacgggatcgatcatccaaaagtgctgagctaccttgatgtcttgcgcgataaagcgccggttggcgcgaaggtggcgattatcggctgcggcggcatcggcttcgacaccgcgatgtttttaagccagtcgggcgcggccaccagccaggatatcggcgagttctgccgcgaatggggtatcgataccagcctgcaaacggcgggagggctgagtgctgaaggcccgcagttgagtaaaagcccgcgacagattgtgatgctgcagcgcaaagccagcaaaccgggcgaagggctcggcaaaaccaccggctggatccaccgcgcgacgctgctggcgcgcggggtgaaaatgatcccggcggtcagctatgaaaagatcgatgatgaagggttacatgtcactatcggcggcgagcgccaactgctggcggtcgatcaggtggtgatctgcgccggtcaggagccgcgccgcgagctggcggatccgctgcgcgcggcggggaaaacggtgcatctcatcggcggttgcgacgtggcggcggagctggatgcgcgtcgggcgattgcccagggcactaaactggcgctggcgatttagccctgtcccgggggcggcgcgatgcgccttccccgggctaccacgataatcccgcacgctagcccggctaaggcgacagccgcgagcagggggaaaccgcgacaagaatcagcgctgcttacgcaccttcgttgctttcaaaatgacaaacttattgttcgtcgcaatcgtcgtgcaattaccaaacgcgcgcttcagcttacggaagtaatcgaggtggcggttgccgacgacgtacagctcgccgccgtatttcaggctgcggcgggcatcgttaaacatctgccaggcgatatggtcggtaatagcgtgttgctgatggaacggcggattacacagaatcgccgtaaagcggtcaggctcaatgccggagagcgagttgttgaccataaattcacagcgtgcgatatcgtccggcagattgcgctcgacgttcaaccggctggaagccaccgccatgtgcgactcatcggtgaacatcacgctggcgtttggattttgcgccagcgcctgcaggccaatcaccccgttgccgcagccgagatcggcgatctcgccttctagatcagacggtaaatgctgcaggaagaaacgcgcgccgatatccagcccgctgcgggcaaaaacgttggcgtggttatggatggtccacggcgtgccgtccagcttccagctgtaggtttgcggcgcatcggcaagctcaggagcggtgaaaacgcagtggatcaaacgcgcttttttccacgccagcgaggtggtggtggtgccgaggattttttcaaacagcgccagcgtcgagttgtgcacatcacgggctttcgccgcggcgatgatgcgggtttccggcgtgactacttcgcgcagggcgcgcagctgctgttccagcagcgccagctgttttggcaccttaatcagcaccagcgccggcgcggccggtagcgggctcaggctatcctgaaagcgcacgctctcttcatcgataccgttcatccgcaggttgtggcgggtcgccagctcggaaataaaggagtcgttgatactgaccgggttgcgctccgccagcgcgcaggcgagcgcgccgaagccgtcgttgaagatgagcgtcaggccgtcgacgtcattcacctgttgcagcagatattcatccgccgcttcccatgcctgaagcgcttcttcttcagcgttaggtgggaaccgctctaatgtgaataactcaccgtttaactctgcctggctcatcgcctctccgcctccggaatagtaaaacccgcgagtttatacgcaaatcctgtccagttgaagagagatcgctgatcatcgccgctcagcgtagatcgccctcgtcatcggctcgcagcagcgttatcgacgcgcgagcgccgggcatcagctgctgcagataacctaccagccgctctcccgcctcatgcagggccgacaacggcatcgccggcaggctttcgagaataaaccacatcgtctgcgcgccgctgtccagccgggtgcgcacgccctgtcgccagttccagcgtcggcaggttacgcctatatcatcccgccagatgacttcgcccggctccggatattccactaccggctctgccgattttagcgtatcgaatggctcatcgccgcgggcaatggccagccgcggttcgccacggtaggcggccagattttccccaccgaccgggacggcatagcgaatgctgatcgcgttgtagatatccaccaccggatcgatggccggcaggctcccctctttcagcacccgcttgcgcagcgcctgcgccgaacagggggtacgtttcgccttcgcgccgaaggcgctgaacgcttcatcccatgccgccaggtgcgcttgcgcccagggcacatcatcctgctgcaccgccaggcaggcctcggccagcgcctgctccgcgacggcgggatcggccaccggcgcgctctccaccacaatacttaatgcccgaaagcccggcgccaggcggctgaccgcagattcgattgacggcgttacgctacgcattcgataatcctgtaatgaccaatttgtttcatcatagtgaccaatgaacgtaaaagtcaatataacgaccgattcaggatctgatgtcgaccaggtaagtcgcgccgtcgccacgcggctgaaggcctaccgtaaagcgaaaaaaatgtcgctggacgagctgtcgcgccgggccagcatcagcaaaggtatgctggtcgagatggaaaaagaggccgccaatcccagcattgcgatcctctgcaaactcgccgccgcgctgggcgtctcggtggcggatattgtcaatgtgtcaagcgaacccgcgttgcatattattcccgccgagcagatccccaccctctggcaaggcccgctgggggcagcgccaggctcctcgccggcaccgccgggccgaatatgattgagctgtggcgctgggagatgcagcccggcgaagcctttgcctcgcctggccacccggcaacaaccttcgagctgctgcacgtggaagccggcgcgctgacgctgacgcttggcgagacctgccgcacggtggcggccggggaatcggcggtggcccgcaccgaaatagagcacggttaccgcaatgagggtaccgcgccgctggtctttaccatgaccgtggctgaactgccctcctgacagacataatgataagacgatgacaaaactcatttatttacagggctatcctgaatcgctgctggcgcaggtgaccacgttaatcgagcaagaccgcctcggcgaggtgctgcaaaagcgctatccgcaagggcacgacgttaacagcgataaagcgctgtatcagtacacccaggacttgaaaaaccgctttctgcgcggcgcggcgccgatcaacaaagtgatgtatgacagtaagatccacgtgctgaacaatgcgctcggcctgcataccgccatttcccgcgtgcagggcggtaagctgaaagctaaagcggaaattcgcgtagcgacggtatttcgcgacgcgccggaagcctttctgcggatgatcgtggttcatgaactggcgcatctgaaagagaaggatcacaacaaggctttttatcagctgtgctgccatatggagccgcagtaccaccagctggagttcgacacccgcctgtggctgacgcacctttcgttaaatcgttctgcgtagtgacgcactggttttgtcatgacggcatgatagagtggcggcaggttccctttaacggagttcgtcaacgtttatgatacgtttcgcagttgttggcacaaactggatcaccaagcagtttgtcgatgccgcccatgaaaccggcaaatataaacttaccgccatctactcccgcagcctcgaacaggcgcaagccttcgccaaagactatcctgtcgagcatctgtttacctcgctcgatgaactggcacagagccctgacgttgacgcggtctatattgccagcccgaactcgctgcactttccgcagacccggctgttcctgagccataagaagcacgtcatttgcgaaaagccgctggcgtcgaacctgcaggaagtcgaggcggcgatagcgctggcgaaagaaaataacgtggtgctgtttgaagcctttaaaaccgccagtctgcctaactttctcctactgaaagaaacgctcgctaaagtgggcaaactacgcaaagcctttatcaactactgtcagtactcctcgcgctatcagcgctaccttgacggcgaaaaccccaacacctttaacccggcgttctctaacggttcgattatggatatcggcttctattgcctggcgtccgctgtggcgctgtggggcgagccgcaggccgttcttgccaccgccagcctgctggacagcggcgtagacgcccagggcaccgtggtgctgagctatggcgacttcgacgtgacgctgcatcactccaaagttagcgattccgcgatccccagtgaaattcagggcgaagacggcgcgttagtgatcgaaaaaatctccgaatgtcagaagctggcgtttgtgccgcgcggcggtaaagcccaggacctgacgcagccccagcacattaataccatgctgtatgaggcggagacctttgcgcggctggtggagacacaggatgtggatcacccgggcctggcggtgagccggatcaccgccaaactgtccagcgaaattcgtcgccagaccggggtgatcttcccggccgatacgcagccgctggcgtaaaagagtgtaaaggcctgaccggccgccattgacgaaaaccgccctgtgacatattttgttacgtgcaaaggggagtaacttccttgccggttgatcgtcattacgatgcgtgcaataccgcatccggtcgccgggcaataaccaaagcccatcgcgatgtactttggttgttgtaagtgagaccttgccggaaggcgaggtctatgcataaaagcgcagcggctgccgtcttccgacgtcagccgttttgtttttatgtaaggaatatcaaatgaatactgtcggcacgccgttgctatggggtggattcgctgtcgttgtcgcgatcatgttggcaatcgacctgctgcttcagggacgacgcggttcgcatagcatgaccatgaaacaggccgctggctggtcaatcctctgggtcacgctttctctgctgttcaacgccgccttctggtggtatctggtgcaaacccagggccgggccgtcgccgatccgcaggccttagccttcctcacaggttatctgattgaaaaagcgctggcggtcgataacgtcttcgtctggttgatgctgttcagctatttcgccgtaccgcctgctctgcagcgccgggtgttggtgtatggcgtactgggcgcgatcgttctgcgtaccattatgatcttcgccggcagctggctgatttcgcagttcgactggctgctgtacgtctttggcgccttcctgctgtttaccggcgtgaagatggcgctggcgaaagaggacgactccggcatcggcgataaaccgctggtgcgctggatccgcagccatctgcggatgaccgataaaatcgagagcgagcgcttcttcacccgtaaaaacggggtgctgttcgccaccccgctgctgctggtgctgattctggtggaactgagcgacgtgattttcgccgtcgacagtatcccggcaatcttcgcggtcaccaccgatccgtttatcgtgctgacctcgaacctgttcgccatcctcggcctgcgcgccatgtacttcctgctggcgggggtcgctgagcgcttctcgatgctcaaatacggtctgtcggtgatcctggtgtttattggcgtgaagatgctgatcgtcgacttctaccatatcccggttgccatctcgctgggcgtggtgggcggcatcctggccgtcacgctgctgattaacgcctgggtcaacaggcagcacgacaagcagcgcaaactgccagagtaatctgctaccgcgccgtcggccctcgctggcggcgcggtaatcagctatagcagacgttctcgtaacgagaatacctgctcatgtcacaattatgttgctacgcagttaaaaaataagatccatattaaaatcacagtattttacgcttcccgccagtctttctttccgtatactcgactatgcaaacatctacttacatcctgacataaacgtaaaaaataatacgtggctgggatggcttgctacatcactggaaggaatgaattatgacaacacgcactccctcatcagggtggctctcccgcctggcgcaaggcagcctggtgaaacaaattttaatcggcctggtgcttggcgtactgttggcgctggtctctaagcctgcggctatcgccgtcggtctgctggggaccctgttcgtcggcgcgttaaaagcggtagcgccggtgctggtattgatgcttgtcatggcctcgatcgccaaccatcagcacggacaaaaaaccagtatacgccccattctgtttctctatctgctgggcacctttagcgcggcgctgaccgcggtgttgttcagttttctctttccctcgaccctgcacttaaccaccgccgccgacagcatcacgccgccgtcggggattgttgaggtgctgcgcggcctgctgatgagcatggtgtccaacccgatcgacgctctgctgaacgccaactatatcggcattctggtgtgggcggtggggcttggcttcgccctgcgtcatggtaacgacaccaccaaaaacctgatcaacgacgtctcccacgcggtgacctttatcgttaaagtggtgatccgctttgcgccgctggggatcttcggcctggtatcttccaccctggcgaccaccggtttcgagaccctgtggggctatgcccagctgctgctggtgctggtgggctgtatgctgctggtagcgctggtgattaatccgctgctggtgttctggaagatccgccgcaacccctatccgctggtgctcacctgcctgcgcgaaagcggcgtttacgcgttcttcacccgcagctccgccgccaacattccagtgaatatggcgctgtgcgagaagctgaatctggatcgcgacacctattcggtctctattccactgggggcgaccattaatatggctggcgcggcaatcaccatcaccgtgctgacgctggcggcggtgcatacgctgaatattccggtggatctgccgacggcgctgctgctgagcgtggtcgcttcgctgtgcgcctgcggcgcctccggcgtggcgggcggctcgctgctgctgatcccgctggcctgtaatatgtttgggatcccgaacgatgtggcgatgcaagtggttgccgttggctttattatcggcgtgctgcaggactcctgcgaaaccgcgctgaactcctccaccgacgccctgtttaccgccgcggcctgcatggcggaagacgaccagctggcgaaaaacgccctgcgcggataacgcctttcccctccgctatcgggcggagggactctcttcctgtactgcgttttcaaccttaaacggatcgataccgcgcttttgcatccggcggaagcgaatgatattcagcccgttgacgatcaggaaactgccttctatcagcgtcccgccaatggaacccaaccacagattatgcgtgacccagcaggcggtggagcaccacatcacgcagcggacggttagccctttgcagcgaaacagcgcccaggtgctggcgacggtgccaatgatcggcagcagctccatggcatgctgcagtttacccaggccgagaatcaacgtcaggaggataaagactgtcatcacccacaggctacgggtgcgtaaggaaatgaccgtgcgaagcgcattgagcccggcgctcattccagccggcccggcgcccatcaggaaaaaatgaacgccgataatagcgctatagaccgccagctgtagcctgaaacggcgttcatcgcggttgataaaggtggtaatgccgataagaaaggcgatgacgccgaccccctgggccagccaatacgcggtcatgtaagctccctgactgaaaaaaacaaacggcgcttcactggctgaaacgccgctgttacgagcccgatggcgctacgctatcaggccgatacacaaaccaagcctctgggcgccaacgcaaatacgcctttacagggtaacaccgcttttaaagatggccagctcgcggaagtcattctgctcattacaggtcggtttaccgttggcgaaggctacaatggcatccacaaactcttccagcagctgcggcatcgttttgccgtggagcagctgcccggcatcaaagtcgatccagtgctttttcttcgccgccagctcgctgttggtggcgatcttcaccgttggcacaaagccgccgtacggcgtgccgcgaccggtgctgaacagcaccatatggcagccggcgccggccagcgcgctggtggcgaccgcgtcgttgcccggcgcgctcagtaaattcagaccatgaaccttcaggcgctcgccgtagcgcagaacatccaccacctggctggagcccgctttctgagtacagcccagcgacttatcttcgagggtagtgatccctccggccttattacccggcgaggggttttcgtaaataggctggtcgtgagcaataaagtactgcttaaagtcattgaccatggtcaccagcttgtcgaaggtcgcttcgtcgcggcagtggctcatcagcaactgttcagcgccgaacatctccggcacttcggtcagcacggtagtgccgccgttggcgatcacatagtctgagaagcggcccagcatcggattagcggtaatgcccgacaggccgtccgatcccccgcactcgaggccaaacttcagctcgctgagcttgcccggctggcgtttatcctgacgcatcacttcatacagctgatgcagatgctcaatccccgcctccacttcatcgtcctgatgctggcaaaccataaagtgcacgcgctgcgggtcaaactcgcccagcgtctcgcgaaaggcctccacctggttgttttcacagccaaggccaaccaccagcaccgccccggcgttcgggtgacgaaccatattttgcagcatggtgcgagtgttgatgtgatcgtccccaagctgcgagcagccataggtgtggctgaagagatgtaccccatcgatatcctcagcgccatacgtctctttcaggaaacggttctgcatttgtctggccatcgcgttgacgcagccgacggtcggcaggatccacagctcattgcgcacgccgacgtcaccgttggcgcgacgataaatctgtacttcgcgatccgcaggctgtggcggttgggcaaccaggtccggttgatagcgatacgcgtcaaggtcgctgagattggtgcgcgtattgtgcgcatgaacatgctcgcccggcgcgatatccgccagcgcatggccaatcggcaacccgtacttaacgacgttttcccctttcgcgatagcgcgcagtgcaaacttgtggccgcgaacgatatcctggccgagggtgaccgagtcattatcaatcgtcaccacgctaccggcagcgatatccgtcagcgcgaccgcgacgttatcctgcgaatggattttgatgtattgcatatcaaccgacctctggccttagttcagttcaatggcgaaatagtcacgcgcattgttaaagcaaatgtttttcaccatctcgcccagcagcgcgatatccgcaggcgcttcgccggcagccacccaacggccgatcatctggcacagaatgcggcggaagtattcgtggcgcgtgtaggagaggaagctgcgactgtcggtcaacatcccgacgaagcggctcagcagcccgagctgcgccagctgggtcatctgccgctccataccgtctttctgatcgttgaaccaccagccggagccgaactgcatcttgcctggcatgccttcaccctggaagttaccgatcatggtgcccagcacttcgttatcacgcgggttcaggcagtagagaatcgttttcggcagcaggttttcttcgttctgcttgctcagcagcttagacagctcttccgccatcggacgatcgttgatcgagtcgaagccgacgtctggccctaacagtttgaactgacggaggttgttgttacgcagcgcgccaatgtggtactgctggacccagccgcgacgggcatactctgcgccgaggaacaccagcaccgcggttttaaactgcgccacttcgtgttcgctaagggtctcgccagccaggcggcgcgccagaatttcatccagctcggcgtcggtcgcttcggcaaacagcaccacgtcgagcgcatgatcggagactttgcagccgtgtgcggcaaaatgatccagacgtttggtcagggcgctttgcagatcagcgaagcggcgaatatcggtatcggatacctcgcccagcttagccatataatcattgaaggtcgccaactcgatgttgaacgctttatccgggcgccagctcggcagcactttgatgtcaaaggagttgtctttggcgacagccgcgtggtgctcaagagaatcaatcggatcgtcggtggtaccgaccatcttcacattcatctgtttcatgattccgcgggcggagaaggcatcctgagccagcaaatcattacactggtcccagatctcatcggcggtggatggcgacaacagcttacctgtaataccaaaaggtcgacgcagctctaaatgggtccagtggtataacgggttgccaatagtgtgcggaaccgtggccgcccaggcgtcaaatttctcgcgatcggacgcatcaccggtacacagacgctccggcacgccgttagtgcgcattgcgcgccatttatagtgatcgcctttcagccagatgtcatacaggtttttaaagcgatagttttcggcaacctgctgcggcggaaggtggcagtggtagtcgaaaatcggctgatctttggcgtaatcatggtacagacggcgggcaaactcggtatcaagtagaaaatcttcagtcataaacgatgtcattcgcgtgtcctcttcgctccagtgtgggagcctttcagatgattgactacaatgctgacaaagttatcacaccaatttctacagaccgaactgtttttcgtgagttagatcaataaacgtcgataaaaaaatgaccgccctggagcaaaacacctcgccagagcgcgccatctctggctttccaggcaagggataaagaccacactaactttcccacttttgtgacagctctcaacttttaaagttgtatgacaagttatctttctgccgtcgcaacatataaaccgacggaatgcattaccggtgcttatggcatcggcttatacggaatggataccgactttcaacataacaactgatggtaaggttcaggccagaggggactaccctcctgaatcctccgtttcgctttcccggccgcttattgcgctcggtaaaggccgcacctgatgcggaaagataacagacgatgaggtttacatgcgtaaaattaaagggttacgttggtacatgatcgcgctggtgacgctgggcaccgtgctgggctacctgacccgtaacaccgtagcggcggccgcgccgacgctgatggaagagttacacatttcgacccaacagtactcctatatcattgcagcctattccgctgcctataccgttatgcagcccgtcgcggggtatgtccttgatattctggggaccaaaattggctatgccttcttcgccatcgcctgggcggtattctgcggctcaaccgcgctggccggcagctggggtggactggcgctggcccgtggcgcagtcggcgcagcggaggccgcaatgatccccgccggcctgaaggccagctcagagtggttcccggcaaaagagcgctctatcgcagtgggctacttcaacgtgggttcctctattggcgccatgatcgcgccgccgttggtggtgtgggcgattgtcatgcacagctggcagatggcgttcatcatctccggggtattgagcttcgcctgggccatcgcctggcttatcttctacaaacacccgcgcgaccagaaaaaattatctgacgaagaacgtgactacatcattggcggtcaggagtctcagcatcagaccaataacgcgaagaaaatgtcgccgtggcaaatcctgcgcaaccgtcagttctggggtatcgccctgccgcgcttcctcgccgagccggcctgggggacctttaacgcctggatcccgctgttcatgttcaaagtttacggttttaacctgaaagagatcgccatgttcgcctggatgccgatgctgttcgccgacctcggctgcatcgtcggcggatatctgccgccgctgttccagcgctggtttggcgtcaacctgatcgtgtcgcgtaaaatggtggtcaccatgggcgccctgctgatgattggcccggggatgatcggcctgttcaccagcccgtacgtggcgattgccctgctgtgcatcggcgggttcgctcaccaggcactgtccggggcgctgattaccctctcttccgatgtctttggccgtaacgaagtcgctaccgccaacggtctgaccgggatggccgcctggctggcgagcaccatgttcgccctggtcgtcggcgcgctggcagacaccatcggctttagcccgctgtttgcggtactggccgtctttgacctgctgggcgcgctggttatctggacggtgctgaaaaacaaaccggctgacgatgactcgacgccgcttagcagccgcaaaccggtcacgcagagttagatcgaatggcaaggtaatcgccgatcaagccgccttctcaggcggctttttcatgcctgccagtggtggaaagcgcgtaaaagtggtataacaaatcgaatattgtcgccatcttccgggagcgaatatggaaatcattgaaccacgccgtctatatcagcagcttgccgctgagctgaagacgcgcatcgaacaaggtgtctaccttgtaggggataagctgcccgccgagcgcttcatcgccgatgaaaaaaacgtcagccgcaccgtggttcgtgaagccattatcatgctggaagtggaagggtatgtcgaagtccgcaaagggtcgggtatccacgttatctccaaccatccgaaataccagcaggtggccgatgaaagccttgagttcgccaactatggcccctttgaactgctgcaggcgcggcagctaattgaaagcaatattgccgaattcgcggcgactcaggtgaccaaacaggacatcatgaagctgatggagattcaggagaaagcgcgtaacgagaaatgtttccgcgactccgagtgggacctgcagtttcacgtccaggtggcgctggcgacgcagaacagcgcgctggcggcgatcgtggaaaagatgtggacccagcgcgtgcataacccctactggaaaaagctgcatgagcatatcgacctgcgtacggtcgataactggtgcgacgaccacgatcagatcctaaaagctctgctgcgaaaagatcccaacgccgccaagctggcgatgtggcagcatctggaaaataccaagcaaatgttgtttaacgaaaccagcgatgactttgaatttaatgccgatcgctacttatttgccgaaaacccagtcgttcatctcgataccgcagtcaacggcgcgaaataaggccttatccctccggcgcgcccccctgcgcgcctgtctgacagtgaggctggagtaagcaagtcatatatagtgtcagcctgtgtaaatcctctcgcctcccatctccgcaatcagcaaaatcaacgagcaacacgttgcaatttctctgacggaaagtcaggtgatttgttacaattagatgcattttgtcgttctgggggtaggtatttacttacttcagtcttatacagggaagcgttcagagcgcctaagcagcgaccataatctcataaaaatcttgtcgccctatatgccacgcgctcagacgtgccgttaaccgatgtaccaggaatcgtgaatggaactatttacccagttattgaatgccttgtgggctcaggattacgaaacgctcgcgaatccctccatgataggcatgctgtattttgtcttgtttatgattttgttccttgagaacgggttattgcctgccgcgtttttaccgggggatagtctgctcgtgctcgtgggcgtgctgatcgccaaaggggcgatgggttttccggaaaccttgctgctgctcaccgccgccgccagcctcggctgctggctaagctatattcaggggcgttggctgggtaatacgcggatcgtgcaaaactggctgtcacacctgccttcgcactatcaccagcgtgcgcatcacttgtttcataagcatgggctctccgcgctgctgattggccgctttatcgccttcgtacgcacgctgctgcccaccatcgccgggctttccggccttaataacgcccgttttcagtttttcaactggatgagcggcctgctgtgggtgctcatcctgacctcgcttggctatctgctgggtaaaaccccggtattcctcaagtatgaagatcagctgatgtcctgcctgatgctcctgccggttgccctgttggtcttcggactgatcggctcgctggtggtgctgtggaagaaaaaatacagaagccggggctaatgatggtcatgaaacgcccttccctgcgccagttcagctggctgctgggtggttctcttctgctcggcgccctgttctggctttggctggcggtgcagcagcaggaggccacgctggcgatacgcccggttggccagggtatcggaatgccggacggtttctccgtctggcatcatctcgatgccaacggcatccgctttaaaagcatcacgccgcagaaggatggtctgctgattaagttcgattccaccgcccagggcgcggcggcgaaagaagttctcggccgcgctctgccacatggttatattattgcccttctggaggacgataactcgcccaccgcctggctatcccgcctgcgcgacgcgccgcatcgcctcgggtaagctgccgccagactgcgtttttaacccagtctggtggtttcccgcatttgttactatgcttaaacctgcgggaatcaacgcattcacgttcaccaacgggaacgggtatatcctccgggtatcccctcagacaatggaaggtactatccatgaaacaccgcatcgctctgcttctggtcctgacttcacttagcgccagcgccctagccgcctctccctgccaggaaaaagagcaggatattcaacgagagatcagctacgccgaaaagcatcataatcaaagtcgcattgatgggctaaataccgcgctacgtcaggttcgggaaaactgtagcgacagtaaactcaaagccgatcatcagcaaaaaattgccaaacagcgggaagagatcgctgaacgtcagcgcgatctgcaggaagcccggaagaaaggcgatgcggacaaaattaacaaacgccagcataaactcaatgaagcgcaacaggagttaaaaacgctggagtctcgggattactaatcaccattaactttcgcaacacggaccacgctacaggagaacgacatggctaaagagaatgtgactgacgaccttcgtgcagaactgaaaacgctggcggataccctggaggaagtactaaattcctcggcggacaagtcgaaagaagagatgggtaaactgcgcagtaaagccgagagcgcgctgaaagagagccgcgctcgtttgggtgaaaccagcgaagcgattcttcgtcaaactcgtgagaccgccgcgcgagcggatgattatgttcgcgaaaatccgtggactggggtaggaattggcgccgccgtcgggctggtgctgggtgtcctgctgtcgcgtcgctgattatggcgaatactcaacacacgcagggaccgggtcagcgcgttttctccattggtcagcgcatcgtcacgctgctggtcgaaatggtggaaacgcggctgcgtctggtcgtcgtggagctggaggaggagaaagccaacctcttccagctgctgatcatgaccggactgacgctgctgtttgccgcgtttggcctcatgagtctgctggtgctggttatctgggccgttgacgctcagtaccgcctgcacgtgatgatcgccaccaccgttgtgctgctccttgccgccgcgatcgtgggtatcctaaccctacgtaaggcgcgccgctccacgctgctgcgtctaacgcgtaaagagctggagaacgaccgtgcccttctggaggaggataaatcgtgaatggccgacaggagcgtgaacggcaaaagacgcagctgctgcgccagatccagcagcaacggctggagctcagcgcctgccgccgtcactggcacgaggcgactgcgcccctcgaccgcggctggcatacgctgctgagtttacgttcgtggctgatggttggcagcggtctgatggccgtatggtccgtacgacatccgcattttttaatgcgctggaccaaacgcggactcggactgtggagcacctggcgcctggtgcgcgggatcctgcgccagtcggcagttcgctagcggccctgagcgtgagcgctttccctggcgcccacgctctgccatttccctgtccgttaccgcaccctgttcgcagcaacatgcgccttttccgtagcgcgcccttctctacgacgccctttacctcacgccataccaggaccggtggtggcccatcgcgttcggtacactttcgcctccgcgtactgattgctcagaaactttgaaatagatctacagttttccttgctaacaattccctctccgcctcgctactatcctctccatcgacagcaacaccgcgtaactacgcgggattgcactaaaaaaaaaaccgccgccctttgggttttctggagtaacaaatgaaaaaattagaagatgttggtgtattggtagcgcgtattctgatgccgattctgtttatcactgcaggatggggcaaaatcaccggttatgcgggaacccagcagtatatggaagccatgggcgtcccgggtgcgctgctgccgctgaccatcctccttgagttcggcggcggtctggcgattctgttcggtttcctgacccggaccaccgcgctgttcactgcgggctttacgctgctgaccgcgttcctgttccatagcaactttgcggaaggcgtgaactccctgatgttcatgaagaacctgaccattgcgggcggttacctgctgctggccattaccggaccgggcgccttcagtattgaccgtgtactgaataagaaatggtaagcgcactatactgaatgaatgaaaaaagcgaggagaccactcctcgcttttgctatctgtagtctgaaggaggagcaaagatgggacaattagttgacggcgtctggcaggatacctggtatgacacaaaatccaccggtgggcgttttaaacgttccgtttccgccttccgtaactggctgaccgccgacggcgcggctggccccagcggtgaaggcggttttgccgcggaaaaggatcgctatcatttgtatgtttctctcgcctgcccgtgggcgcatcgcacgttaattatgcgtaaattaaaaggtctggaaccttttctccccgtatccgtggtcaatccgctgatgctggaaaacggctggacctttgacgatagcttcccggaagccaccggcgataccctctaccagcatgactttctctatcagctgtatctgcacgccgacccgcactacaccggacgcgtgaccgtgccggtgctgtgggataaaaaacagcagaccatcgtcagcaatgagtcggcagaaatcatccgcatgttcaataccgccttcgatggccttggcgcccgggccggggattactacccgccagcgctgcgggaacaaatcgatgagctgaacggctggatctatgacaacgtcaacaacggcgtgtataaagccggctttgccaccagccagcaagcttacgacgaagcggtggatgcggtctttacctcgctggagcggctggagcagatcctcggccagcatcgctatctgacgggcaatcagctaacggaagccgacattcgcctgtggacaacgctggtacgcttcgacccggtatatgtgacccattttaaatgcgataaacggcgcatcagtgattacctcaatctgtacggtttcctgcgcgacatctaccagatgccgggtatcgccgagacggtgagttttccgcatatccgtcaccactattaccgcagccataaaaccattaaccctaccggtattatttccattgggccgcagcaggatctcaacgaaccgcacggtcgcgatcagcgcttccgttgatctgtcgggcgccagtgatggcgcccaataattcagaaaacagatatttacccaccattcattcacgtctattcttattgcgatcgcttaaaaaacaagtgattgacggttaattgaggcgtagaaatggactggtatctcaaggtattaaaaaactatataggatttggcggccgtgcgcggcgcaaagagtactggatgtttattctggtcaacctcatcctgaccggcgtattgagcatcatcgataaaatgctgggctggcagcgggctggcggcgaaggcattctgaccactatctatggcgtactggtctttttaccgtggtgggcggtgcaatttcgccgtctgcatgacaccgatcgttcggcctggtggctattgctgctgttgatcccggtcatcggctggctggtgatcctgatctttaactgccagcgcggcaccgaaggcaataatcgcttcgggcccgatccgaaacccttttcctactaatcttcctgctcctcccgctagcgggaggagggtcttcatcactatctgccggcaaacagcttggggatctcacgcagacaccaggacttcgcttcgcccatactgtcccgtcgccaggccatgataatgtcaatttcattggtgtattccgggctgacgacccgcaggcgaccttcggcaatatccttctccaccagcggatagggcatagtcgccacgcccagtccggccagtagcgcctgacgtttatcttctatcgtactcaccgttaaacgcggctgtttatccagcagttgaacggtgaggacgggccgctcgcgcgcggtatccgccaccgcgacgccgcggtatttcacgcgggtaacctcagagagcggctccggctcctgatggatcgggtgatccggcgccgcgacgtacacactgagcaccgaatagagtttgcgcgagttaatctccgaagaggaacgaaaatgcatatccggtgcgacaacgatatccgcccgcccctgctccagccgctcccaggcgccggccagtacctcagtgataatcgacagctgggtgtttgatttagtcgccagtttctcaatcagcggaaacagatccggagtgggcaccagcgcttcggtaacgatcgtcaggtgggtttcccaaccacgcgacagggcttcagcatcggtggtgagtttatccgccgcttcaagcagcacgcgcccgcgctccagcagcattcttccaacgttagtgaacttcgtgcgatgacctgagcggtcaaacagcaccacgtccagttcctcctccagtttttgcatggtgtagctcagggcggaaggcacgcgtcccagctcatcagctgcggcagcgaagcttccgcgccggtcgatcgcatccatcacgcgtaacgcttccagcgttaatgctctctctttggccatcgctttctcattcaggaaatttgaacataccgggcagaatatctggctaacaatacagcgtccatacctttaccattgatttagtgtaaagagaggtcaagaacatgattactacccgaacagccaaacaatgcggacaagcagacttcggctggctgcaggcccgctacaccttctcctttggccactacttcgacccgaaattactgggcttcgcatccttgcgcgtcctcaaccaggaagtgctggcgcccggcgcttccttccaggccagaacgtacccaaaagtcgatatcctgaacctgattctggaaggcgaagcggagtatcgcgacagcgacggcaaccacgtgcaggccaaagccggtgaagcgctgctgatcgccacccagcctggcgtgagctatagcgagcataatctgagtaaagagcagtcgttaacgcgaatgcaactttggcttgatgcctgcccgcagcgggaaaacccgctgcagcagaaaatcaatgtcgcagacgcgacgctgcagctgctggcctctccggagggcggggataacagcctccagcttcgccaacaggcctgggtctaccatatcgcgctggagaaaggtgagcagatcaacgtgcaattacatggtccacgcgcctacctgcagtcgattcacggctccgtccatgccgtcgcacaggaacagcaaaagcaggctctcacctgcggtgacggcgcatttattcgtgacgaagctaacattaccctcgtcgccgatacgccgctgcgcgctttgctgatagatttaccggtgtaacaacggaagtgatggagtctgtcagtgagtaagaagaaaaacagaaaaaaggcgtcaccaacgccgttagccccggtgcaaccgcaagtcgccggggccgccagctttggttatgatgagatgcttagcgaactggaagccattgttgccgaagcggagatccgcctgcgggatgaagaaagtctcgcctgaaacggcaaaatggctgggttgattttcattaatggcctgaagaagatatcggccccgcgaggggccgatggcattattcactcagcgcgtcggcaagatcttttttcacctgcgtgcgctgctccggcgtcagtaccttattcacctcaaaatagtacttcacgcggtaataacgcacctgctgatcaatcttgctgaaggccgccagctgatcgttgaccgctttttcatcccatttaccggaatcaatcacgtttatcagagccccgtctttaatttcctgttgggaaatctgctggacattactctccaactgctgatgcaggcttttaattttcgcgacctgatcgttggtaagttttaagtgctgaacaataggatcctgcgccggtgctggcgccgccttaacgtctgcggcctgagccgtgatagagaaaccggtggtcaacagcgtggcaaaggcaatacgggttatcaatttcattttttttcctgaagtaaaggtggcagaaatagcggattattattttccagggcgcagtgaataaatgtaaaaaatgatagccaaacattatatatatccacagcactaatatacttcactaaaacatataaaatatgaataccgtgttaacttatatagttgacgccctaacatcaccaggttttattttaatttcaacagcaagcaaaatatttgacagtggtgacttttcctttaatttaattagcgcatattacgttatccagcgcatcaaggatatcatttaaaaatagataaggagattgagatgttattacgttttcgcgtattaccgctggtttttgtcatctcgctgttaagcggctgcggcctggcttctaaagccttttattccgcgggagacaaattatttcaacctggagatgacgccgtcgcttcgatgcagacgtattcagtggctcagttcctgcagccgtttactctcaacccggcgaaggccagcagcgattatctgggtaaatgggtcaaggtacgcggggtgattgtcgacattcgtcggaagagcggtatcgccggcagctactattttatcgtgaccatgcgagatgaacagaataaaacggataaacgtcttacctttaattttggctcgcataacagcgcagacgtagaggctttaagcaacggcagcgtcgctacgatcgtcggccaggttcatcaggtgcaagattccacgatcccgacgctacagaatcctaaggtggttaaataacggtagctgaccgagaagccgccttcttttggtatagcgtcgtggacagttattcatccgcgtcacgggttcagatagcaaaaaccccgccgaagcggggttttgacataaaaaggtgaaactgaccgataagccgggttctgtcgtggacagtcattcatctaggccagcaatcgctcactggctcaagcagcctacccgggttcagtacgggccgtaccttatgaacccctatttggccttgctccgggtggagtttaccgtgccgcggactgttaccagccgcgcggtgcgctcttaccgcaccctttcacccttacctgatcccgcttgcgcgggccatcggcggtttgctctctgttgcactggtcgtgggctgtgacaccccccaggcgttacctggcaccttgccctatggagcccggactttcctcccctccgcccgtctccccccgaaggaggacgacgacgaagcggcgactgtctggtcagcttcggcgcgcagtatagagggtttaccgcccgttgtcatccctcagtggtcatcccaacctgcagggtggcagcaatattacgcgacgcgcggtaaatattatcaaacgccccgcgaaatgcctcttccagcgtcgaaacggaagttaacacgctgaatacggcatcgataccgtgctggtgaaccacgccgacatcgtgagtcaggctgccagcaataccgatcaccggcttacggtatttcttcgccacccgggccacccccaccggcaccttaccgtgaacagactggctatcgagccgcccttccccggtgaccaccagtgagcagtcatggatttgttcttccagcttcagcgcctcggtaacgatctcaatcccgctgcgcagctccgcattgagaaaggccatcagcgccgcacccatgccgccggccgctcccgcgccggggatcgacttcacgtccacctgcagcgacgtcttaatgacgtcggcataatgcgccagattacgatccagctcgacgatcatcgcctcggtcgcccctttctgtgggccaaagatccgcgacgccccacgctcgcctaccagcggattggtaacatcgcaggccacgtggatcatcctgtcacgtaagcgcggatcgatggcggaaagatcgatccggctcagacggctcaaactgcccccgccatggccgatctcttgtccctcggcgtcacagaggcgggcgcctagcgcctgcatcatacccgccccaccgtcgttggtcgcactaccgccgatgccgataatgatccgttccgcaccatgctccagcgcctgtaatattagctccccggtaccccgtgaagtggtgatgagcgggttacgtttgtcgggcggaacgagccccagaccgctggctgccgccatctcaataaacgcggtgacgccgtcgccggacatgccccagcaggccttcactctctcacccagcggacccgttacccatgcgaaatgttcctttccctgggtggcggcaatcatggcttccaccgtcccctcgccgccgtcggcgacgggcagggaaacatactgtgcatcagggaaaatttcccgaaatcctttttctatcgcctgagctacctcgctggcagaaaggctttctttgtaagagtctggggcaatgacgattttcataattttgtagcctgacagtgccgcgcaaggcaagcataacagggcgcgcagggcgcccttcttgttagcgagtgacttccactttcgccagtttttcgtaatagcacgccagcgcgctatggtctgcagtgccgagaccgtccgcgcgcagcgcctgcatcatctccatcaccgccgccgtcagcggcagttgggcgcccacgccgtgtgaggtatccaacgcattggccagatctttaatatgcaggtcgatacggaaacccggtttgaagttacggtccatcaccatcggagctttcgcatccagcacggtactgcccgccagaccgccgcgaatagcctgataaaccagatccggattgacgccggctttagtcgccagggtcagcgcttcagacatcgccgcgatgttcagcgcgacaatcacctggttagccagtttggtgacgttgcccgcgccaatatcgccggtatgcactacggagccggccatcgctttcatcagatcgtagtatttatcgaagatcgctttatcgccgccgaccatgaccgacagcgtgccgtcgatggctttcggttcgccgccgctcaccggcgcatccagcatatcaatacctttggctttcagcgcttcgctgatttcccgactcgccagcggcgcaatggagctcatatcgatcactacggtgcccggtttcgccccttcaataatgccgttttcacccagcgccacctctttaacatgcggagagttcggcagcatggtgatgatcacctcgcactgttcggcaatcgctttcggcgtcgtcgcggtctcagcgccagcggcgatcacgtcggcaatcgcttccgggttacggtcagacaccaccagcgagtaacccgctttcagcaaatttttgctcatcggtttgcccataatgccaagaccgataaaacctactttgattgtcataatgttctctctcttcatcctggtgattattttttaaacgcgtcggcaagtttctgggttgcagaacggaagacgcccagatcgctgccaacggcgacgaaggtcgcgccccattccagatagcggcgcgcatcggcttccactggcgccagaatgccgcttggcttaccgtgcttcttcgcgctggcgaagatatgctggatagcgcgctgcacctcaggatgggcggcattgcccaaatggcctaaggcggcggccaggtcgctcgggccgacaaacacaccgtccacgccctcggtcgcggcaatcgcctcgacgttttccactccggtctggctctcaatctgcaccagaatggaaatgttcttgttggactgggcgaaatagtccggcacggtgccaaacatattgccgcggtgggaaacggagaccccgcggatcccttccggcggataacgggtcgaagccaccgcctgcgccgcctgttcagccgtctcgacaaacggcaccaggaagttatagaagccgatgtccagcatgcgcttgatgatgatgggttcattggtcggcacacggactacctgcgcgctggagctatctttcagggccatcagctgcggaatgagcgtggtgacgtcgtttggcgcgtgttccgcgtccagcaccagccagtcgaaccccgccagacccagcacctcggtgctaatcgggttagccaaagcgcaccagcagccaatctgcacctgatgcgccgccagcgcggccttaaatttgttcggaaaaattgcgttatccatgatttttaccttgcgttaatcgttgcttacttctgcaattccatacgtttgatatcgccaaccacaaacaggtagcagaccatcatcatcagcgcggagccgccaacaaaaatcagtgcgccattaaatgagtgcagttcgctcacgatgtagccaataaccagcggcgtggcgatcgaggccacattgccaaagacgttgaataccccgccgcacaggccaacaatctccttcggcgcgacatccgagatgaccggccagcccagcgcgccaaagcctttgccaaagaacgccagcgccataagcgtaatgaccagcggcgtgctggccgtgtagttacacaggatgatggacgacgccagcagcattcccagcacaataggcagcttacgcgcaaaagtcagcgtgcagccgcggccaatcagataatccgaaaacagcccgcccagtacaccgccagcaaagccaaacagcgccggaatcgaagccacaaaccccactttcagaatcgacattcccttgtcctgcacgaggtagatcggaaaccacgtcaggaagaaccatgtaatggtattcaggaaatactgaccgaaaaatacgcctaacatcattcggttagtcagcaactggcggatatagtccatcttcggcccggccgccggggtggcctcttttttatggtccatatcgaccactgcgccgccttctgagatatatttcagctccgcggccgacattcgcggatgatcggtggggttatgcacaaacttcacccagatgatggtgagcacaaaccctattatccccatcacggtaaagacatgttcccagcccagcgcgaaggtcagccagccgagcagcggcgagaacagagccagcgagaagtactgagcggcattaaagatagctgaagccgtaccccgctctttggccggaaaccaggccgccacaatgcgggcgttggcgggaaacgagggcgcttcggaaaagcccagcataaaacgcataaagaacatggagaccccggcccaggcgagcgggaacacatcaataaagccttgcaggaaggtaaacagtgaccagaaaaacagactgtatgaataaacctttttcgagccaaatttatccagcagccagccgccagggatctgcatcagcagataagcccagccgaaggcggaaaaaatgtatcccatcgacaccgcgctgagccccagctctttcgcgacttcagtaccggcgatagacaaggtcgcgcggtcgccatagttcactgccgtcaccacaaatatcatcaacagaattaaatagcgggtcggtattccttttttttcatctaatgtagaatccaaaatcatttagacattcctcgggcacagaacaccttttataattgttttaagtggtttctgatttatttaaaagacgatattgaaactgtctattcgcatatcgatcacctcaaaaacatgactcagtataatcagcacgcccccgccagacactatgcatacccacaatataaagttattatttaaagccataattgtgctcatgccataagtcatgggcgctaatccacacttcttacgattgcctgtcctgcagaggttagcgtcataaaaaggagtgatgccgatcacattttaaaatcaactcagctgacatcctttattccatcatactgatatgtagcaaatgaattagcgttttattttattattagcacctgtttggagatgactggacaatggctgacattgcaattcgacaacaatcgccgaccgcgttttatattaaagttgacccgacagataatgtggcgattattgtcaacgatcgcggcttaaccgccggaacgcgtttcccggacggcctgacgctcgtcgagcatatcccgcagggtcacaaagttgccctggtggatatccccgcccatggtgaaatcatccgctacggcgaagtcattggctatgccgtacgcgatatcccgcagggaagctggattgacgagtcgctggtggagctgcccaccgccccgccgctgaataccctgccgctggccactaaagtgcctgaaccgctaccgccgctggaaggttacaccttcgaaggctaccgcaatgctgacggcagcgtgggtaccaagaatctgctgggtattaccaccagcgtgcactgcgtcgctggcgtggtcgattacgtggtgaaaatcattgaacgcgacctgctgccaaactatcccaacgtcgatggcgtggtgggcctgaatcatctctacggctgcggcgtggcgattaatgcgccggcggcggtagtgccgattcgcaccattcataatatcgccctcaacccaaacttcggcggcgaggtgatggtcattggcctcggctgtgagaagctgcagccggaacgcctgctgcagggcacggaagacgtcaaaagtatcccggtggacagcgccagcatcgtcagcctgcaggatgaaaagcatgttggttttaaatcgatggtcgatgacattctgcaggtcgccgagcgccacctggcgaaactgaaccagcgccagcgggaaacctgcccggcctctgagctggtggtcgggatgcagtgcggcggcagcgacgccttttcaggcgtgaccgccaacccggcggtaggttacgcgtccgacctgctggtgcgctgcggggcgacggtgatgttctcggaagtgaccgaagtacgcgacgccattcatctgttgaccccgcgggcgattaacgaagaggtcggtaaacgtctgctggaagagatggcctggtacgataactatcttgatatgggcaaaaccgaccgcagcgctaacccctcccccggcaacaagaaaggcggtctggccaacgtggtggaaaaagcgctggggtcgattgccaaatcagggaaaagcgccatcgttgaggtgctctctccgggtcagcgtccgaccaaacgcggcctcatttacgccgcaacccccgccagcgattttgtctgcggcacccagcaggtagcctctggcatcacggtgcaggtattcaccaccggtcgcggtacgccgtacggactgatggcggtaccggtgataaaaatggcgacccgtaccgagctggccaaccgctggtatgacttaatggacattaacgccgggaccatcgccactggcgaagagacgattgaggatgtcgggcggaagctgttcgaatttattctcgacgtcgccagcggacgcaaaaaaaccttctccgatcaatggggcctgcacaaccagctggcggtatttaacccggcgccggtaacctgatcgagagcgtaaggatttaaccacttttagcccggatctatccgggcttgttggttagggatgctgggcggcaagaaaagcgctgatctccgcctgcgtcgaggtgccttccatggggccgcgttggctaatcgccagcgagccgctggcgtttgcccatctcagcgcctcccggggcgtggcgccattgaggaacagactaacaaaagtggcgccaaagcaatccccggcaccagtcggatccaccaccggcacgctgaagccggcgacatggtgcgtctcgttggcactaaagtagcttgcgccacgcggcccgcgtttaatcaccacatgcttcacgccgcgtttcagtagcttatcaaccaggacctgctcattgcgttccggattgagaccaaagtaatccagctcgccatcgctcggcaggaagatatcggtgtagtcgaggatatattcaaaggcctgcgacatctccgggatgttcagcatctctttgcgaatatttgggtcgaacgatactgtgccgctgcggcctttaatgttttcaatcgctttacgcatcgcatcgataatacgaaacgagaatagcgatgaccccataatatgaaaatgctgacactgatttagcaacgcttcgtcaatgtggtcggcagtcagcagaccgcaggcgctgttaggcatattaaaaataaaatcgcgctgcgcctggctacgatagctgacgaaggcgctaccggtagtcgctttctgcagcatagcgatgccgttgacgttgacgccgtctttctccagccgcgcaatattcatctcgccaaatgcgtcgttgcccacacagctaaacaacacggagccgaaacccagctttgccacctgatcggcaaatattgccggcgccccgctgggatagggcccccaaaattcaccgggacgggaaaacccctgattctcttccttggcgagaaactccaccagcagctcgccgatggtgcaaatggttacgttcatcaccgctcctggtttgtcttatgcaaagccgtgttgagccatgtcaggcattcattgttggtatagctgttggtcaaacccgcggcgaggaagcaggcatggtactctgccgcgacgacctgaggggtcacgacgctgctgatctgctgtaattcacccacagcataacgtttctcgccatagaccggccgggaagcgacaatcgcaatgactcgtttactctgggccaccgcttcgcttaacaaatgtgccgtaacctcgttacgcacgcttagcgtgccgtcttcagcaatgtggtccaccgctatcagcgcacgtgaagggcggtaatgacccaacgccttcagcgccagttcgccctccacaatccgcccctgaccggacaacaccccgccaagcagaacggtttccccatttaaaaactcctgcgccagcgcgacgtggcccagatcatttaatagcaggcaaagctcttctctgttggccagaaaggggatcactttacgcaaaatggaaccctggcctagaaacagcgtttcgccattttctatctgcgccgccacctggcgagccatttccgtctccagcgctttatctctgacggcaggcgcttctcgggtcatcgcaaccggcgcgccagcctgggcggtataaatcgccccgccaaaagagcgtttcaagtagccctgctgctcgaggtagttgagatcgttacggattgtcaccccggaaacagccagcatttctgccagatcgtcgactttgatctcgccgttcttacgaacgatctctgcgatgtccaagcgccttttcagcaagctggttgacggttttgccacggtttatgccttattattttctcctggaataactttcatttttaaatttccctcttgcaatgtcaaaccgcggctgtagccctatcccgccatcaatcagcaaatcgatattaatcatgtagttacaaattggcaccttaccaactcaaactttaaaaaagaaaccttataaatactaytaactttcattttaaaaatcaattcatcattgtgtgcggtggatcacacctaaaaggcgagacgatcgttacattactttcaaactgaaggttattaaccaaaaataacttacaagatgaaaacagaggactaaaatgtacatcatttccagtaaaaacatgctattaaaagctcagcgacagagttatgccgtgccggctttcaatatccataacctcgaaaccatgcaggtcgttgttgaaacggcggctgagttgcgctcccccttgatccttgccggcacccccggtacctacagctatgccggcaccggcaacgtggtggcgatcgcccgcgatctggcaaaaaagtgggatctcccgctcgccctgcacctcgatcatcacgaggatctggctgatatcacgcgcaaagtgcaggcagggatccgctcggtcatgatcgatggctctcactcaccgttcgaggagaatgtggcactggtaaaaagcgtggtggagttgagccaccgctatgatgccagcgttgaagccgagctgggccgtctgggcggagttgaagacgatctggtggtcgatgctaaagatgcgctctataccaaccccgaacaggcccgcgaatttgtcgctcgtaccggtattgattcgctggccgtcgccatcggtaccgcgcacggcctttacaccgccgaaccgaagcttgattttgagcgcctggcggctattcgcgactgcgttgacgttccgctggttctgcatggcgcttccggcctgccggatagtgatattcgtcgcgccatttctctgggcgtatgcaaagtcaacgtcgccaccgaactaaaaatcgctttctcggatgcgctgaaagcctacttcctggaaaatccgggcgccaacgatcctcgtcactatatgaaaccggcgaaagcggcaatgaaagaggtcgttcgcaaagtcattcacgtttgtggctgcgaaggacaactgtaatcagcggatcgaaggagccttgctgtgatccacaccctgacactgaataccgcgatcgatatgaatatcttttgcgatccgctccagccggcggcagtcaaccgcacccggcaaacggaatattgcccgaatggtaaaggggttaacgtctcgctggtattacatcattaccagcagccaacccatgtcatgggcatattcggcggttttaccggccgctatatcgttgaggaactacgcaaacagcatattaatgtcacaccggcatgggtcgctgaaccgacccgtataaatatatttattaacgacggcagtgatgaatacaaactggtaaatcccggcgcgcggattgatgatgaaggaaaagaacaaattcttcaccatttacagtgcgtcgcgcccggtgattatttagttatcagcggcagtctgccaccgggaatagagagccggttctatagcgagattctggtgctgtgccagcagaaagggtgtgaagtcatcttagatatcagccacccggtgctgcgccagctgttagagtggcgtccactattgattaaacccaatgacgacgagctgaaagagatctttggtctggatgtcagcagcccccggcgggtacgcgaagcaatgcaaacgctccaccagctcggggctcgcaatgttctgctgacccttggcgcgcaagggctctatttttcgaacggcgcgcaactgtggttctgctcggcaccgaaaatcgaactggtcagctcggcctgcgccggcgatgccgcgctgggtgcattcctcagccattggcttaacacagacgatattccccaggccctggcgctggccagcgccaccggcgctgatgtggccgcctccgccgggctgggtaaattaaaccgtacgcaagaattattacaacaacttcagatcgtccaattataaaggtccgattatgaaaaaaattattgccgtgaccggctgccctacaggtattgctcatacatttatggctgaagaggccttaaaaaccgcagcgaaaaaattaaatgttgaaataaaagtcgaaaccaatggcgcttccggcgtagaaaacgccattacgtcggaagacctgaaggatatttatggcgtgattatcgctgccgataaagatgttaatgccgaacgttttaatggtttaccggttattgaggtgccggttaaagaagccattcaccatccggcggaattaattaataaagtcgttaacggtcaggcgccgcgtcgtcagggattctccgcggcaacggatccagacgagaaatatgagcgagaatcgttcggccgacagatttacaaacatctgatgagcggcgtttccaacatgctaccgttcgttgtcgccggcgggatcttaatcgctgtttctttcttatggggtatctactccgccgacccgaattcaccgcagtataacgtgattgccgccacgctgatgaaagtcggtcagcaggcgttctcgatcatggtgccggtgtttaccgcctacattgcctggtcgatatctggccgccctggcatggttgccggttttgtcggcggtctgctggcgaacgccaccggcgccggattcctcggtgggatcatcgccggttttgccgccgggtattttatgctgctgatccgtcatctgctcgacggtctgccgcgccagtacgaagggctgaagtcgatctttattatgccgctgataggcgtcctggtgatcggcgtgatgatggtcctgctcggccagccggtggcagcgatcaacaatggcatgatgaactggctcagctctttacaggaagccaacccgatcctgctggggatcgtggtaggcgcaatgtgctccttcgacttcggcgggccggtcaacaaagcggcctatgtcaccggtacgttgctgctgggtcaaggtaactacttttttatggccggtgtatctgccgcctgcatcacgccgccgctggtcatcgctctggcgaccacgttctttccgaaaggctttagcgaggaggaacgcgccgccgggatggtcaactatatcctcggctgtacgcacattaccgaaggtgcgattccctttgccgccaaggatccgctgcgggtgatcccgatgatgatgatcgcctcctcaatttctgcggtactcagctacagcctgcatattcaggttccggcaccgcacggcggcttcttaatcctgccgctggtcagtaaaccgttgatgtgggtgctgtgcattctcgccggttccgcctgcggggcacttatgctgggatgctggcggctgtggcaaaaacgcactgacaaagcgacagctcttgctggcgccatgaaataaggagcaagctatgcaactgacttctgccgatatttgtttcgatcgtcaggtcaaaacaaaagacgaggcgctacagcgtgtcgttgcagccctgacccatgccggacatacgcgggcagactatctacaaggcatgcgcgagcgcgaggggcaaatcagcacctatctgggcaacggcattgccattccccacggtacgccgcacagtcgcgacgcagtgcttaaaacgggcgttaaggtgctggcttgtccgcagggggttgactggggtgaggagcaaaccgcctatctgattgtcggtatcgcggctcaggacaatgagcatctcgatattttgcgccagctcacccatgctctgggcgatgatcgagtacctgaggcgctgacgcgcgctgataccccccaggcggtgctggaaattctcgccggcgacattcctctgccagcaggcgaagaaccacaacccgcgccgcaatttgacgaagaggccacctttaccctgcgtaatccgcacgggctacatgcccgtcccagcgcggtgctggtgaaagccgtcaagcagtggcgatcgcaaatccgggttgaaaaccttgatacgcgctccgccattgttgatgccaagaatctgatgcgcgtcgtatcgctgggcgccaaacagggtcatcgtctgcactttatggccagcggcaacgatgcgcagcaggcgttaaaagccattggtgacgcttttaacgccggtctcggcgaaattgccgcccagccgcagcaggtctcccaggaagccgtcaaaacgaaacgcagctggctatcccgaatatttagttaattttcaattaattaaaaacgccctgtcttcctggtcagggcgtttttgtctcgaaagacgatacctttcactgcgttacaacactatttatcgatgcagatcacaaatcaaaacaaagccatttgcgaccaaaacaaaacataacgaatatattcgaaagaaaacggaggttgtaaatgaaagacattatcactcgccataagtcaggcgaacatatcggcatctgttcagtatgttcggcgcatccgctggttatcgaagcggcgttacgtttcgacctgtcgaccaacaataaggtgctgatcgaagcgacgtccaaccaggtgaatcagtttggtggctacaccggcatgcagccggccgatttccgcgacttcgtctacaacatcgcgcgtaccgtcggttttccggcggagcgcattattcttggcggcgaccatcttggaccgaactgctggcaagacgaaccggccgccgtggcgatggaaaaatcaatcgacctgatcaaagcctacgtcgccgccggctttagtaaaatccatctcgatgcatcaatgtcctgtgctgacgatccggtgccgctggatcctggtgtggttgctgagcgcgccgctcgcctgtgtcaggctgccgaggagaccgccagcgatgagcaaaagcgccacctgacctacgtcatcgggaccgaagttccggttcccggcggcgaggccagcaccatcggcagcgtacatgtcacccgggcgcaggatgccgccgcgacgctcgaaacccatgaagccgccttccgtaagctggggctcgacgccgcgctggagcgagttatcgccatcgtcgtgcagcccggcgtggagttcgaccatacgcaaatcattcattaccagccgcaggaagcgaaagcgctctccgcctggatcgaaagcaccccgatggtctacgaagcgcactcaaccgactaccaaacccgccaggcttatcgtgcgctggtccgcgaccacttcgccattctgaaagtcggcccggcgctcacctttgccctgcgtgaagccatctttgccctcgcccaaatggaaaatgagctgatcgccccggagtctcgcagtcgcgtgatggaggtgatcgacgaagtgatgcttaacgaacccggctactggaaaaaatactatcgccccacctggagccaggcgatggtcgatatccacttcagcctttccgaccgtatccgttattactggccgcatccgcgtattcgccaaagcgttgagaaacttatcgctaatctgaccgacgctaagctaccgctggggcttatcagccagtatatgccggtgcagtttgaacgactgtcgctgaatgaactgaacgccgagccgcacgcgctgatcctcgacaaaatccaggatgtcctgcgtgcctatcgctacggctgttcttctgaaaccgcgtgaagttaagaggatatatgagtcaactgtttgttcgtaccggcattcatttcagttccagtcagcaggcactggaacacattggcgcagagatgctggcgcgaggcgtcgtacatgacagctatcccgccgccctgctcgaacgcgaagcgacttttcccaccggcatcgccctggagaagcatgctgtcgctatcccgcactgcgaagcgatccacgcgaaatcaccggccatttacctgatacgtccggacatgccggtctcttttcagcgcgctgacgacgacggcgaaatcgacgtttcgctcatcatcgcgctgattgttgaaaacccggcggcacagctgaagctgctgcgccggttatttagtgagctacaaaatccgcacacgctggaggcactgctcgccgcttccgacgatcggctgccggtgcggttccagcaattaatccttgagcccgagcttagcgccgtggcttcataagatactgataataaaaggggtaccctatgaaacgtaaagttatcgtcgcctgcggcggtgccgtcgccacctccacgatggcggcagaagagattaaagagctgtgtgcagaccacaatattgaactggatttggtgcagtgccgggtcaatgaaatcgaaacctacatggacggggcggacctgatctgcaccactgcgcgcgtggagcggaccttcggcgacattccggtggtgcacggcatgccattcgtctcgggcgtcggcattgaagccttacaacagaaaatcctcggcatcctcgcggagtaaacgccatgtttagcgaaatcatgcgttatatcctcgatctcggtccgacggtgatgctgccgatcgtgatcattatcttctccaaattactggggatgaagctcggggattgttttaaatccggtctacatatcgggatcgggtttgtcggcatcgggttggtcattggcctgatgctcgactccatcggcccggcggcaaaggcgatggcggagcatttccagattaatcttcacgtgatcgatatcggttggccgggttcatcaccgatgacctgggcgtcgcaaatcgccctggtggcgatcccggtggccatcgcggtcaatatcgtgatgctggttacccgtatgacccgcgtggtgaatgttgatatctggaacatctggcatatgacctttaccggcgcaatgctgcatatcgcgaccgggtcgtactggataggtattctcggcgtggtggtgcatgctgcttttgtgtataagctgggcgattggtttgccaaagatacccgcgatttcttcggcctcgagggtattgcgatcccgcacggcagttcggcgtatttagggccagttgccgtcctcgtggataccatcatcgacaagatccccggtcttaaccgtattcactttagcgccgatgacattcagaaacgcttcggccccttcggtgaaccggttaccgttggcttcgtcatggggctggtgattggcgcgctggcgggttacgacctgaagggcattcttcagctggcggtgaaaaccgcagcggtgatgctgctgatgccccgggtgatcaaaccgattatggatggcctcaccccgatagccaaacaggcgcgtaaacgtctgcaggctaaattcggcggccaggaattcctgattggtctcgatccggcgctgctgctcggtcatacctcggtagtctcggccagcctgattttcatcccgctgaccattcttatcgccgtcgtggtccctggcaaccaggttctgccatttggtgacctggccaccatcggcttcttcgtagcgatggcagtggctgtacatcagggcaatctgttccgcacgttgatttccggggtcatcattatgggaatcaccctgtggatcgccacccagaccattggcctgcacacccagctggcggcaaacgccgggaccctgaaagccggcggcatggtggcctcaatggaccagggtggttcgccgattacctggctgctgatccagctctttacctggcaaaatgtggttggcttcgcggtcatcggcatcatctatctggccggcgttttactgacctggcgtcgcgctcgcggcttcatcgccgcggaaaaagcagaaaaaagcgctgccccgcaacaaagtacaggcatgtcttgatctaaaaggggagcgttcgctcccctgaatcttatagctggagaatgttatgaaatcagtggtaatccatgctgaggggaacgtctgcgttgaagaacgccctatccccacgctgcaaacggaaaacgatgtcctggtcaaagtggtcagttccgggttatgcggctccgatatcccgcgcattttcgccaaaggggcgcattactaccctattacgctggggcacgaattcagcggttatgtggaatcctacggcgcggcggtaaccgacctgcagcccggcgatgccgtcgcctgcgtgccgctgctgccctgcttccagtgcccgcaatgccagcgcgagtatttctctttatgtaaacagtatcagttcgtcggctcacgcagcgaaggcggcaacgccgaatatgtggtggtaaagcgcgccaacctgttccgcctgccggaccagatgccaattgatgatggcgcgtttatagaaccgataaccgttggcctgcacgcttttcatctggcgcagggctgtgaaggtaaaaacgtgattattatcggcgccggcaccatcggcctgctggcgctacagtgcgcccgcgaactgggcgccaacagcgtcacggcgatcgatatcaatccgcagaagctggagctggccaaaaccctcggcgcaacccatgtgttcaacagtcgcgagatgagcggccaggcgattcagcaggcgctggaatccattcagttcgaccagttagtcctcgagaccgccggtacgccgcagaccgtcgcgctggcgattgaggccgccggtccgcgggcgcagctggcgctggttggcacgcttcatcacgatttaaccctcccggcagccaccttcgggcagattctgcgtaaggagttgaatattgtgggtagctggatgaactactctggcccgtggccgggagaagagtggcaaacggccacccgtctgctgactgaaaaacgcctgcagctggcgccgctgatcgcccatcgtggcgacgcagaaagcttcgctcgtgcagtgcaggcgctcaacggcgcgccaatgcaaggcaaaatcctgctcaaactctcttgaccgcccgagccagccatcagcgctggctcatccaacctttcgaaaattatcgttcacctttcgttacccttcgattacactgagatgagttaattatcaggcaaatcaagatgaactcatttgaacgaaggaacaaaattgtcgatatggtgaatacgcagggtagcgtattggttctagacctttcgaatctctttggcatctctgaggtaacgatccgcgccgatctccgcttactggaagaaaaaggactgttaacccgttttcacggcggcgccgcccgtgcgggtagcgacctgaccgacgccgagaatcaggaagtggtgcttgaagaccgctatcagcttgccagcgatcccaaaaagcgcatcgcccatgccgcggcagcgatgatccgtgaaggtatgacggtgatcctcgatagcggtagcaccactcttcttatcgccgaagcattagtacggatgaccaatatcaccgtcatcaccaacagcctgcccgccgcgtttactctggcagaaaataaagatatcaccctggtggtgtgcggcggtaccgtgcggcacaaaacgcattcgatgcacggcacgattgccgaacgttcgctgcaaggtatttgcgccgatttgatgtttgtcggcgccgacggtatcgacgccaccaatggcatcaccacctttaacgaaggctactccatcagcagcgtgatggccgccgccgcgcatcaggtgatcgccgtgctcgacgccagcaaattcaatcgccggggctttaaccaggtactgccgatggaaaagatagactgcgtgatcaccgacgacggcattagtgaaaatgaccgtgcagcgttaagcagcaaaaaggtggaactgaagatagtgtaattgcacgctgagtggaacatcatggcggctggttctacttaaccagccagcttccaccttttttggcgcctatgcgaatcaatctccctttcgcctgtagcccttgcagatgacgctcaaccgtacgtgctgatatccccaagatctccgccagcgctctcgccgttaattccggcttttcggttagcaaacgcaaaattgcgttttccggtggggctaatttgacgtcgatttcttccgacatttcttccgacatttcttccgacatttcttccgacacgatgaatgaagtttccagaccttctttcagcgccgccaggatattttgcaacatccaggtcacgaatagcgtgcaatcactggttttatcacaagcacctaaaatgtcgtaataacgttcttgctgatggtggatcagcgtttcaaccggcagccaggccaattcctgacgccactggcttagaatcaacgtctgccataaacgccccatccgaccattgccatcagcgaaagggtgaatgaactcaaactcgtagtgaaaaactgaactggcaattaaaggatgtagctcggtgtgttccagccaactgagtaaatcagcgatcaatcttgggacctgggcagcaggcggagccatatgtatcacctgcgtaccgcgataaatgccgacgtttccgccacgtaaagcgcctggacgatcaaccagcccggtcatcagcgttttatgcgccgtcagaagatcgctaatgtttgccgcatgccatccgggcattaattcataagcacgaatggcatttctcacttcctgaatatccttagccggcgccagaacccgtttgccttccagcagcgccgttacctgttccatgctcaggctattatgttcaatcgcgagtgacgcctgaatagtacgaatgcggttttctttacgcagcaacggcgatgcttgtccacgtttcgccgaccaatgcccaagcaattccccaatctcaacgacaaggttgaggaccgagggtgtgatgctaaacggcggttggtaacggctcatcgtttactccccctgctgctccagggcgtacttatacaacgcatttttcttcacgccgtggatttccgcggccagcgcggcggctttcttcagcggcagctccgcctgcagcagcgccagagtacgcagcgcggccgccggcagcgcctcttcctgagccttgaaaccttcgacgatcagcaccatctcgcctttgcgacggttttcatcttccttcacccacgccaccagctcaccaatcggcgcgccatggatcgactcccaggttttggtcagctcacgagccagcaccacatagcgggattctcccagtaccgcgcagatatcctccagactctccaccagacggtgggtcgactcatagaaaataagggtgcgcggctcttcttccagcgctttcagggtatcgcggcggcctttcgatttcgccggcaggaagccttcataacagaaacggtcggaaggcaggccggcggcgctcagggcggcgatagccgcacaggggcccggcagcggcaccacgcgaatattcgcttcgcggcaggtgcgcaccagatggtaaccaggatcgttaatcagcggcgtgccggcatcggaaaccagcgcgatgttttgcccttctttcagtttggcaagcagggtttccgccttttgctgctcattatggtcgtgaagcgcaaacaaacgggcgtttatcgcaaaatgttgcagcagcaaaccggtatgacgggtatcttccgctgcaattaaatcaacggcttgcagcacttccagtgcacgctgcgtgatatcagacagatttcctatcggagtgggcacaatatagagctgcccctgagaattatccgctgattcgtgttgtttcattgtctcgtccgtattgccgatttaatattgagcattgagccaaaaaaatatcactggacacttatggtaccgtcaacatttcttcgttctaagcccgcgcgctgcctgcccgtattgctggcgactcttatttttgctggctgcggcacccacacgcaggatcaaagcgcggcgtttatgcagggtacgtcgcaggccaactccagtttctacttacagcagatgcagcaaagcacgaatgatagcaagaccaactggcaattactcgccattcgtgcactactgcaggaagggaagaagcagcaggctatcgacctgtttaaccagctgccggcgaacctgaacagcactcaggcccgtgaacagtcgctgctggcggtggaagtgaagctggcgcagaacgattatcaggccgcccgtaatctgctggctaagatcgatccgacaagccttgagcagcctcaacaggcgcgctactggcaggcgcaaatcgatgccagccagggcaaaccatcgctgaccctgctgcgcgccttaatcgcccagcagccgctgctgagtgacgccaaacagcgtcagaaaaatattgatgcgacctggcaagcactcacctcgatgccccaggaccaggccaatgcgctggtgatcaacgccgatgaaaatatcctccagggctggctggatctgcagcggatgtggtttgacaaccgcaacgatccgacgctactgaaagcgggcgttaaagactggcagacgcgctatccgcaaaacccgggcgctaaaatgctgccgacggcgcttgtgaatatgcaaaactataagcctgcgtccatcaacaagattgcgctttttctgccgctaaacggtcaggcgtcgatcttcggccgcacaatccagcagggctttgaagccgccaaaaacggcgcgccgtcggtgacgggcagcgcggttcccgcccaggtcgcccaggcggcgaatgtctccggtaatgatgatgtggtgagtccgtcgcaggcagaaatcagcgatcttaccgccaccggaagccgcgcggatccggttcaggccccgacgcaggaccaggcagcgcctgctgcggaaccggcagcccaggcgccggcaacatccaccacgccgcagactaccgcttccccggccacccagccggttaccgcgccggccgcacagccgcagcccgtggtcgcaaccgccgctaacccttctgcggaactgaaaatttacgacaccaccagccagccgataagccagctgctcgcccaggcgcagcaggatggcgccaccctggtggttgggccgttgctgaaagaaaacgttgaagaggttatcaagagcaacacgccgctcaatgtgctggccctcaaccagccggaaaaagtcgaaagccgcgctaacctctgctatttcgcgctttctccggaagacgaagcgcgtgacgccgcccgacatatccaccaacaggggaaacagaccccgctgctgctggttccgcgcggcgcgctgggcgatcgtgtggttagcgcttttgccgacgagtggctgaagctgggcggcgccagcgtcctgcagcagcgttttggatccacggccgagctgcgcgccggcgtgaacggcggcgggggcattgcgctgagcggcaccccggtctccaccctgccatcagcgcagaacagcatcctcggcagtgcggatgagatgccggtaagcagcggcggcagcgtcgatgcggcctatatcctcgccaccccggaacagattgcctatatcaaaccgatgatcgccatgcgcaacggcagccagagcaatgtcaccctgtacgccagctcgcgcagcgcccagggcaccgcggggccggatttccgtctggagatggaaggcttgcagtatagtgagatcccaatgctggccggcagcaatccgtcgctaatgcagcaggcgctgtccgcggtgcgtaatgactactcgctggcgcgtctgtatgccatgggcgctgacgcctggtcactggcaaatcacttcacgcaaatgcgccagacgcctggcttcgagctgaacggcaataccggcgatctgacggccaaccaggattgcgtgattaacaggaaactgtcatggctcaagtaccagcagggaaaaatcgttccggccagctaagcaaacagaccggcgatgcctgggaaaaccaggcgcgccgctggctggaaggccagggcctgcgttttatcgccgccaatgcccgcgagcgtggcggcgaaattgaccttatcatgcgcgacggcacggtcaccgtttttatcgaagtgcgctaccgccgtagcgcccggtacggtgatgcggcagccagcgtcactccgcaaaaacaacaacgactgcttaaagccgcccgtttgtggctctgccgacagaatgggagctttgagactgtggattgccgtttcgatgtggtagccttcaccggaaacgacatccaatggctaaaaaacgcctttggcgaatagcgtaataccagaagtaagggatcccgtgctcgacagaatcaaagcctgctttaccgaaagcattcaaacccaaattgccgcagcggaagcactcccggacgccatctcccgggcggcgatgacgctcgtccagtccctgcttaacggcaacaaaatcctctgttgtggtaatggcacctccgccgccaacgcacagcattttgctgccagcatgattaatcgctttgaaacggaacgccctggtttacctgccattgcactaaataccgataatgtggtcttaaccgccatcgctaacgatcgcttgcatgacgagatctacgccaagcaggtgcgcgccctgggacacgccggcgatgtgctgctggcgatctctacgcgcggaaatagtcgggacatcgtcaaggcggtggaagccgccgtgacccgcgacatgaccatcgtcgcgttaaccggctatgacggcggtgagctggcgggcctgttaggtcaacaggatgtcgaaatccgcatcccctcccatcgcagcgcgcgtatccaggagatgcacatgctgaccgtcaactgtctgtgcgatttgatagataacactctttttccacaccaggacgattaaggagaacacatgaaggctctctcgcccctcgccatcctgctttctgcactactgctgcagggctgcgttgccgccgcggtagtcggaacggcagcagtcggcaccaaagccgcaacggacccgcgtacggtgggaacccaggtcgatgacagtaccctggaactgcgcgtcaatagcgccttgtcgaaagatgaacagattaagaaacaggcccgtatcaacgtcaccgcttatcagggcaaagtcctgctgaccggccagtcgccgacgccggacctctccgcgcgcgccaagcaaatcgccatgggcgtggaagggaccacggaagtgtttaatgaagtgcgccagggccagccgattggtttaggcaccgcctcgtctgatacctggattaccaccaaggtgcgttcgcagctcctgagcaccgatcaggtcaaatcctcgaacgtgaaagtaaccacggaaaacagcgaagtcttcctgatggggctggtgaccgaccgcgaaggccgggcggcggcggatattgccagccgggtaagcggcgtatcccgggtgaccaccgcctttacctacattaaataaagctgcagtttcccggctggcgctgcgcttagccgggctaccgccccctgtacgttgtgtgccgggtaaggcgtagccgccacccggcatccaatccggctatgcgtacgtttacggcaaactacaccagcgccagcgcaccgacaatcgccccgcacagcgccaccagtccgcccgtcagccacagcgctttggccgggaaggctttacgcagcataatcagcgacggcacgctcactgccggcagagtgatgagcagcgccagcgcgggcgccgtccccatacccgccagcatcattgtctgcacaatcggaatttccgccgcggtagggatcacaaacaggcagccggcgatcgccatcgcgataacccagaacaacgtattatccaccacgccatcggcgtgcgggaacagccagacgcgcgccgctcccagcaccagcaccgcgaggatataaaccgggatcgtgttccagaacagcgtccacagcgcccgcagccagcggctaaagaagccgccctgagtcgcttccgacggtgcagcaggcaccgctaccggctgcgtcgccgcctctttcacccatttctgcaccagcgtcgccacagttaatactgtcgccaggcccgccaccaggcgaaccagcgcaaactgccagcccagaacaaagcccataaacaccagcgtcgccgggttgagcagcgggttccccatccagaacgccagcgccccgcccatcgacacctgctgtttgcgcatcccggccgcgaccggcgcggcgcagcaggtgcacatcatgcccggcagcgagaaaatcgctcccagcagcgtgccctgaaaccgcgattgtcccagggtgcgtagcagccagtcgcgcggaatgagtacctgaatcaacgacccgagcagcacgccgagcaccgccgctttccagacggcaaggaagtaaaccatcgcatagtcccacgccgccatcagcgggttagcgtcggcctgggcgagaatagatttaccgatactgtgggtttccgcagcggtgaaggctttcccgtagtacggctgccatttgacgtaccacagaccaacaatcacgacgagaaagaaaagcgcgggtttccaccattgaaatggtgacgccgcctgagatgaagactgaccagccatagcattccccagcaagaaatgtggatatgaattgaagccgtgaatactacgccggaagcctgcgtttgcaaaccgctattcagcctgccgcgcggcgcgctcccgtagttccgatgatgtcagaattcgcaccccttcgtgggtgggcgacagcgcctccgccagcagggcgatcgccacatcgcgggccgcaatggatttccagttccccggcaagagccggaacaatggtgcgaggaaggtctcattggcccgctttttttcccgctcgcctgacagcatcgacggcctggcgatggtcagccgcggccagtcttgctcaatcagcgccgcctccatttcccccttcacccgattgtagaaaaacggcgagtgggcgttggcgcccatcgcgctaaccaccagcatatgttgcgcacccagtcgtttgccggtcagcgcggtatcaaccaccagcgtgtagtcagcatggacgaaggcctctttgctcccggcctcccggcgcgtcgttcccaggcaacagaagacgatatccaccgggtcaaccacctgcgccagggcatcggtcagctggggatcgtgaggattaaaaacacctttcgctggcgccagcgggcgacgcgtcggcgcggcgatggtgcttatacggggctcattctgcagcagccggagtaagtgaccgccaactaacccggtcgcgccggttaataatacctgactcattggttctcctttacagaattctccgccttgcactttcgggctcatgttccaggcttaataccttacaaggtaagtatccaccatcatcatggaattacctcattgaccatccagacagtggaggaagcatgagtaaaaagatagccgtcctcattaccgacgactttgaagattctgaatttacctctcccgccgaagcctttaagctcgccgggcatcaggtcatcacgatcgaaaagcaggctggcaaaacggtgaagggtaagcagggagaagccgaggtcgccatcgacagagccatcgatgacgtcacaccgggtgaatttgatgccttattgctgcccgggggctactctcccgaccagctgcgtggtgatgaacgcttcgtcacctttacccgcgattttgtcaacggcggtaagccggtgtttgccatctgccacggcccgcagctgctgatcagcgccgatgtgatccgcggacgtaagctcacggcggtgaaaccgattgtggtggatgtgaaaaacgccgggggcgagttttacgaccaggaggtggtggtcgataacgaacagctggtcaccagcagaacgccggacgatctgccggccttcaatcgcgaagcgctacgcctgctcggcgccggcatcacgccgccagtgtaatttcttcccgaaacccagcgtgttgtcggtaaatttgatttcgtccggacgaatctcccataccggcgccgacagcatgcgggccaccgggaagcgcttgacgtagcgctggcgcattcgcgcctcttcgtcaccgctcagacgacggatctcgcctttgaactgcacgccgcggatcagagccacggtttttggctggccgttgaccgtgccggccaccttcgccctctgtccggtcatctggccatggcgggtgtgctcctcgctgagcagataaaaggccacggtatccgggtcatagacgtaaaaggcattcgcgcaccacagctcgtcttcacgggagacgcaccaggtgacgacgtgctgtttactcagccagcgaccaatggcggcaagcgtatccatctttcttctccattatgctatggtgcacacaccttaccatagtgactttgtgaccgtgtgctggtttctgtatctcattcgaaccgcggataatcgcctttataccggcatcaccaccgacgtgccacgccgctttcgccagcatcaggcgggaaaaggcgcaaaggcgttgcgcggcaaaggcgacctgcagctggcctttagccacgaagttggtgaacactcacttgcattgcgactggaatatcgcgtcaagcagctaacgaagcgcgaaaaagagcgcctcgttgccggagaggatgccttcgaaaccctgctggcaaggcttaaagacgattaaagtgctcgctgtattctacctggccatggacgccgtcgagggcgtcatccgccagacggtgaacctggaacgcctcggcgctgtccggccagcggcagcggagatcgaagcgcgcggccgattcaaagccgaagcgacggtataaatccgggtcgcccagcgtcaccaccgcggcgtagccaaactcattcagcgagtccagcccttcataaaccagctgccgaccaatgccctgtccgcggtagcgttcatctaccgccagcggcgccaggccgacccactgcagctcttcaccttccaccgccaccgggctgaaggcaacgtagccgatcacctggccttcatcatccgtcgccactaccccagcgtgatcagtccatcttcacgcagatcgtgcaccagctgcgcttcggcatcgcggccgaaggtacgacgcagcagcgcgtcgattcccggtgcatcaatcccaatctccactcgaatcagcatgcctcacctaccgatgtctgttcaggtttctgcgggctcttcagtccagcttcgacaaaatccgccagttgcagcaacatcacgcgcagcgcttttggcatctgctcgagctcaatggcgtccatcaaattttttacatacagccccagctccgtatcgccttcaatgaccagacgacgctggaagaatagcgtatccggatcctgcttgcgcgcggcgatcattaacagatcgctggcgtcggcgctgaagctgacgtcggcgtcggcctgctggctgaccaccagtcgaccatcgactaccgaggtataccacagcagaccgatgtcacgcacatgaatacttaaccaacgcccctcaagaaactccagctccccctccgccagagcctggcgaaactgccagctcagcacttgctccagcacctggcgcttgagggcaaaaggcgccagcttaaccggcacgctcattaaagacgggccaaagtggaccagccgggaacgcagtttatccaacacaagctttactccatgaatgcaatagttccgctattgtgccatatcacataaacaacatagcggcgtaaatcaacaaaaacgcgatgacggccgccagttattggcgccgccaatacacttttaactgcctcaaatcaaaaattgtcaccagaaggttaactaaaatccctgctcgttaaccattcagcgtccctgacgggccgcatttttcaggaaaaattatggagctgctctgcccagccggtaaccttccggcgcttaaggcggccatcgaaaacggcgccgatgccgtctatatcgggctgaaagatgacaccaacgcccgccactttgccggccttaatttcaccgaaaagaaactgcaggaagccgtcagctttgtgcatcagcaccgtcgtaagctgcatatcgccatcaataccttcgctcatcccgacggctacgcccgctggcagcgagcagtggatatggccgctcaattgggcgccgatgcgctcattctggccgatatcgccatgctggagtacgctgcggagcgttacccacacattgagcgtcacgtttcggtgcaggcttccgccaccaatgaagaggccattcgcttctatcatcgcaacttcgacgtcgcgcgcgtcgtactgccgcgcgtgttgtctattcatcaggtgaaacagttggcccgcgccacgccggtgccgctggaagtcttcgccttcggcagcctgtgcatcatggcggaaggccgctgctatctctcttcctacctgaccggcgaatcgcccaacaccgtcggcgcctgttcgcctgcccgcttcgtacgctggcagcaaacgccgcaggggctggaatcgcgtctcaatgaagtgctgattgaccgttatcaggatggcgaaaatgccggttatccgacgctgtgcaaaggccgctacctggttgatggcgagcgctatcacgcgctggaggagcccaccagcctcaacactctggaactgttgccggaattgatggccgccaatatcgcctcggtgaaaatcgaaggccgtcagcgcagcccggcttacgtgacccaggtggcgaaagtctggcgccaggcgatcgatcgctgcaaagccgatccgcagaatttcgtaccgcagtccgcctggatggagaccctgggcgccatgtccgaggggacacaaactacccttggcgcttatcaccgtaaatggcagtgagaaacatgaaatattcattagggccggtgctgtactactggccaaaagagacgctggaagatttttaccagcaggcggcaaactgcagcgccgacaccatttatctcggcgaagcggtatgcagcaaacgccgcgccaccaaagttggcgactggatcgaaatggcgaaaacgctggccgctagcggcaagcaggtggtgctctccactctcgcgctggtgcaggcctcttctgaactgggcgagctgaagcgctatgtcgataacggcgaatttctgattgaggccagtgatttgggcgtggtaaatctctgcgccgaacgcaagctaccgttcgtcgccgggcatgcgctgaactgctacaacgccgttaccctgcgcctgctgcggaaacagggcatggtgcgctggtgcatgccggtggaactctcccgcgactggctggctaatttactgacccagtgcgaagagctgggtatccgcaaccagtttgaagtcgaagtgctgagctacggccatctgccgctggcttattccgcgcgctgctttaccgcccgctcggaagaccggccaaaggacgagtgcgaaacctgctgcatcaagtaccctaccgggcgcagcatgctgtcgcaggagaaccagcaggtgttcgtgctcaatggtattcagaccatgagcggctacgtctataacctgggcaatgagctgacctccatgcacggcctggtggatatggtgcgcctgtcgccgatgggcaacgagaccttcgccatgctcgaggccttccgcgccaacgaaaacggcgctgcgccgctggatctcaccagcaatagcgattgcaacggctactggaaacgattgccaggactggtgcttcaggcctgataaaccgctcactttgttaacaacagtgctcagattttaatgcattattaaagatgcagcttttctggctggcgcgtccaggatgcgccaggctggaagaagaccttcaatctgatgacgatgctgtagcaaagtgagcctttatgactgacaaatctgttccattctcggtgctcgatctggcgccgatcccgcaaggatcttctgccaaagaagcctttacccactctctggatctcgcccggctggccgaatcgcgcggctatcatcgctactggctggcggagcaccataatatggtcggcattgccagcgcagcgacctcggtgctgattggctatctcgccgccaacaccaccaccctgcatctcgggtccggcggcgtgatgctgcctaaccactctccactggtgatagctgagcagttcggcaccctgaacaccctttaccccgggcggatcgacctcggccttggccgcgcgccgggcagcgatcagccgaccatgcgcgccctgcgtcgccatatgagcggcgatgtcgataatttcccgcgcgatgtagcggaactggtggactggtttgacgcccgcgatccgaacccgcacgtgcgcccggttcccggctacggggagcgcattccagtatggctgctgggctcaagcctctatagcgcgcaactggcggcgcagctcggcctgccgtttgccttcgcctcgcacttcgcgccggatatgttgttccaggccctacatctgtatcgcagcaatttcaaaccttcggcgcggctggaaaaaccgtacgcgatggtgtgtatcaatatcatcgccgccgacagcaaccgcgatgcggagtttctcttcacctccatgcagcaggcgtttgtgaagctgcgtcgcggcgagaccgggcagttgccgccgccggtggaaaatatgcatcagctgtggtcagcatccgagcagtatggtgtgcagcaggcactgagcatgtcgctggtcggcgataaaactaaagtccgccatgggctagagtcgattctgcgtgaaaccgaggcggacgaaatcatggtcaatggccagatcttcgaccaccaggcgcgtctgcattctttcgatttagcgatgcaggtgaaagaggagctgttggggtaacacacacgtcagcccggtggacgtcgcgccaccgggcaatagctttactgataaaccggcagcagattgacgctcgacaggatatgtacaaccgcattgccgaggccaaagagcaggatcagcacaatcattggcgttccgccccagacgcggaactgtgggctgccgaagcgtttgcgtgaggcgcgagccagcagcgccggtacaatcgccgcccagatcgtcgccgccaggccagcatagccgatggcgtagaggaaaccatcgggtttgaccagtccgccaatcatcggcgggataaaggtcagcagcgcggttttaaagcgtcccatcgcgctatcgtcaaagccaaacagatccgccaggtagtcgaacagccccagcgtcacgccgaggaatgaactggcgacggcaaagttcgagaacaccaccagcagcagatccagactccgactattcagcacgccgctcaacgcctgcaccagcacatcaatgttgccgcccttctgcgcaatgtcgataaactgcggacgagggatgttacccatcgtcaccagcagccagaccacgtacagacccagcgccagcagcgtaccgtaggttaagcagcggatgatggtgcgcggatcttttccgtagtatttcatcaggctcggcacgttgccgtgatagccaaacgaggccaggcagaacgggagcgtcatcagcaggtatggcgcataggaggcattcttctccgcaacgttaaatagcgtcgtcggctcgacgtgcccgagcaggctaccgaaggtcaggaagaaggtgatcaccttagcgcccagtacgatagccgtcatgcggctcaccgctttggtgctcatccagacgataaacgccaccagcagcgcaaagccgaagcccgccgcgcgcgccggcaccttcagcgacagttcactgaaggtgtggtggaggatcgaaccgctcgccgaaatataggcgtaggtcaggatatagagcacaaaggcgattgatacaccgttcaccaggttccagcccttgccgagcaggtctttggtaatggtgtcgaagctggagccgatgcggtagttaagattggcctcgaggatcatcaaaccggagtgcagcatgcagaaccaggtgaagatcagcgccgccagcgaccagaaaaaccacgcgccggacatcaccaccggcagcgagaacatgcccgcgccgataatcgtgccgccgataatcaccacgccgccaaacagagacggacgggttgccgtagtggttagtgtcgccatttaccgaattctccagtcgaaaatacttcgctcacgttgagcatgacgcactgtaccagtacacgagtacaaagggaataaaaaaagccccaatcatgacgatcggggctgtattatttagtttacgctagcgggcggcgttgattacgcatcgccaccgaagcgacggcgaccggctgagtcatcgcggcgcggcgcggatgcatcgtcacgacgcggcgcacggccttcacgacgttcgccgctgaaacgacgtccttcaccacgaccgccttcacgacgttcgccaccgaagccacggccgccttcacgacgctcgccgccgaagccacggccgccttcgcgacgctcaccgccgccacgacgttcggtgcgcggctgcgcatcgcccagcagctgcatgttcatcggcttgttcaggatacgggtacgagtaaagtgctgcagcacttcgcccggcatccctttcggcagctcaatggtggagtgagaagcgaacagcttgatgttaccgatgtaacggctgctgatatcgccttcattggcgatcgcgccaacgatatgacgcacttcaacgccgtcatcgcgacccacttcaatgcgatacagctccatgtcacccacgtcacgacgctcacgcttcggacgatcttcgcgatcgccgcgcgggccgcgatcattacggtcgccacgacggtcgaaacgatcgtcacgatcgcggaattcacgacgtggacgcatcggcgcgtccggcggaacgatcagcgaacgttcgccctgagccatcttcagcagcgcagcagccagcgtttccacgtccagctcttcaccttccgccgtcggctggattttcgccagcagtgcacggtactgatccagatcgctgctttccagctgctgctgaactttcgcggcgaatttttccagacgacgcttgctcagcagctccgcgttaggcagttccacttcaggaatggtcagcttcatagtgcgttcgatgttgcgcagcagacgacgctcgcggttctcaacgaacagcagcgcgcggccagcacgaccggcacgaccagtacggccgatacggtgaacgtaggattcagaatccattgggatgtcgtagttcaccaccaggctgatacgctcaacgtccaggccacgggccgcaacgtcagtcgcaatcaggatatccagacgaccatctttcaggcgttccagagtctgctcacgcagcgcctggttcatgtcgccgttcagcgccgcgctgttgtagccattacgctccagcgcttcagctacttccagggtcgcgtttttggtacggacgaagataatcgccgcatcaaagtcttccgcttccaggaaacgcaccagcgcttcgtttttacgcatgccgtaggcagtccagtagctctggctgatatccgggcgagtcgtcacgctggactgaatgcgcacttcctgcggctctttcataaagcgacgggtaatgcgacggatagcttccggcatggtggcggagaacagcgcggtctgatgcccttccgggatctgcgccataatggtttctacatcttcgataaagcccatgcgcagcatttcatctgcttcatccagtaccaggccgctcagtttggagaggtccagggtgccgcgcttcaggtggtccagcagacgacccggggtaccgacgacgatctgcggaccctgacgcagggcgcgcagctgcacgtcataacgctggccgccgtacagggcaaccacgttcacgccgcgcatatgtttagagaattccgtcattgcttcagcaacctgtaccgccagctcgcgggtcggcgccagcaccagaatctgcggtgctctcagctcaggatcgatgttgttcagcagcggtaaagagaatgctgcggttttaccgctaccggtctgggccatacccagaacgtcgcggccgtccagcagatgcggaatgcactcagcctggatcggagatggtttttcgtaacccagatcggtgagcgcttcaaggataggagccttcaggcccagatctgcaaaagtggtttcgaattcagccatgtagtacgtgtgcctcaaaattaatggcggccagtctacataactcatcgtgaaaatttacggtaattttcattgaaaagtgtgaaccggctcaaagtaggtgtattaacgaacaacaacgccctcacccgcgaaggtgatggcaagcaaaaaactatgggctgatgtgttcgtcagctattgctggtccgattctgccaggtcatcttgctcctggcccaagagcgataattccaacaatgcgtatcggtgctcaacgtagttgtgtacgttgttggcgaccgccagtttgaacagtgccgtagcgctgtccttgtccccagacttaggtagtacttacctaaatagaagttggtttcactgagatgctcagcgagcgaggtgttatccgttgcgtctgccttcagacgagtcatcagctctttttcgctaatgtcgccaaggtagaactcgacaatgttccatccccattgctctttatccgacttgtttaagcgctctctgagtgcttcaagcgcccgcttctcgtcgagtttacgctcggcgatataaagccacaggctacggaaaggatcattgggatcgtcttgataaaacgccagcagatcatcttgcgctaacttagcccggccgccgtaatacagggcgataccgcggttcaagtgcgcgtagttgtaagttggatcaagctcaagtacagaatcaaacgcttcataggcagcatcaaaattgcctgcctgcgttaagtaaatgcctaagtaattgaatacttccggcatatcgggtcggattgccagcgcttgtgaaaaatcatttcgcgctagtgccctcagaccgagactatcatacaacactccgcgctcatataaaagctgtgcgcgttcgtcatcggataaagcccgactggcaagaatttgttccatgcgtgccagaatcacttcttgctgtaaagtcggttgcaatggtactgcgaggacggcgtccttacgccaggcggtgctactgcatcctgccagcgtgagagctgtcgccacgaaacaccagcgcaaaaaaggcttcatttcccactcccgaagacaacgattggatgaacgtcctgttccccggctgcaaacgaggcgtcctgcccgtaaaacgccctccgcaaaaacggagggctaacggcaaccttactcgccctgctcggcagccggagcttccggcgctgcggcagacggagtctgttcagttgcttctttaatgctcagacggacacggccctggcggtcaacttccagaaccttaaccggtacttcctgacccatctgcaggtagtcagtcactttctcaacgcgcttgtcagcgatctgcgagatgtgaaccagaccttctttaccgccgccgatggcaacgaatgcgccaaagtcaacgatacgggtcactttaccattgtagatgcggccaacttcgatctcagcggtgatctcttcgatacgacggatagcatgctgcgctttgtcgccgtcggtcgctgcgatcttcacggtaccgtcatcttcgatctcgatggtagtaccggtctcttcggtcagggcacggataacagaaccgcctttaccgataacgtctttgatcttgtccgggttgatcttgatggtgtggatacgcggtgcgaattcagagatatcgccgcgcggcgcgttaatcgcctgctccatcacgcccaggatgtgcagacgcgcacctttagcctggttcaatgcaacctgcatgatttctttggtgataccttcaattttgatatccatctgcagcgcagagataccgtcgcgggaacccgcaactttgaagtccatatcgccgaggtggtcttcgtcaccgaggatgtcagacagcacgacgaagttgtcgccttctttcaccagacccattgcgatacccgccacagcggcttttaccggcacgcccgcgtccatcagcgccagagaggcgccgcagacggaagccatggaagaggaaccgttagattcggtgatttccgataccacgcgcacggtgtacgggaattcttcaatagtcggcatcacggccagtacgccgcgcttcgccagacgaccgtgaccgatttcacgacgcttcggagaccccaccatgccagtttcgcctacggagtacggagggaagttgtagtggaacaggaaggagtcggtgcgctcgcccatcagttcgtcgatgttctgcgcatcgcgtgcggtacccagagtcgcggtaaccagcgcctgcgtttcgccacgggtgaacagcgcggaaccgtgagtacgcggcagaacgccggtacgaacgtccagaccacggatcatatctttttcacggccatcgatacgcggctcgccggccagtacgcggctacgaaccacgtttttctcgatggcgtgcaggatttcacccagctcgttagcgtccagggtttcatcttcagcaaccagcgtggcgatggtttcagatttgatcacgtcaacctgagcgtaacgctcttgtttgtcggtgatacggtaagcatcgctcagacgggattcagccagcgcagccacgcgcgcgttcagcgcttcgttgaccgcttccggctgccagtcccaacgcggtttaccggcttctttcaccaggtcgttgatgttctgaataacaatctgctgctgctcgtggccgaagaccaccgcgcccagcatctggtcttcgctcagcagttccgcttcggattccaccatcagcacggccgcttcggtaccggcaaccaccaggtccagtttgctggacttcagttcttcctgggttgggttcagtacgtactggtcgttgatgtaacccacgcgcgcagcgccgattgggccattgaacggaataccagacagcgacagcgcagcggaagcaccgatcatcgcgacgatgtctgggttaacctgcgggttaacggaaacgacggtggcgataacctgaacttcgttaacgaagccttccgggaacagcgggcgaaccgggcggtcaatcagacgcgcgatcagggtttcgccttcgcttggacggccttcacgacggaagaaaccacccgggattttaccggcagcgtaggtacgctcctggtagttaacggtcagcgggaaaaagtcctggcctggcttcgcttttttctgacccacaacggtaacgaataccgcagtgtcatccatgctaaccatcacagcggccgttgcctggcgcgccatcatgccggtttccagggtcacggtatgctggccgtactggaatttacgaacgatcggattaagcaaaattctatcctttttatctataaatcacgccatatccacgacatagcgtctattgacccgatcttctgcatcctcgcgactaatgacaacctttacccgcccctgcggatgaagcctctcattagccgcgcgaacctctgcatgaagatcattactagcaacaatacatgagttttgaatgaattgctgccgcccggtcgaaaaaaggggccgtcaggcccctttttctgaaactcgcagaattagcgacgcagacccagacgctcaatcagcgcagagtaacgggcaacatctttacgtttcaggtagtcgagcagtttacgacgctgagaaaccatgcgcagcagaccacgacggctgtggtgatcttttttgtgctctgcaaagtggccctgcaggtggttgatctgtgcggtcagcagtgcaacctgaacttcggtagaaccgctgtcgttttcgccacgaccaaactcagaaacgatttttgctttagcttcaacgcttagagacattttataactccaaaaattaaaagaaagaaagggtgccgatctctaattcagcgacccctgatgcaacgcccgaaaatgttaaaacacgttagcggacgttaagcggcgatattctactcgtagcaggcttttatcgcaagaaaagcgcttacgccgggtattccaccaccagacgacgcggggccacgcggccttcatcgtcaatttcgcccatgccgagaaacttgccggactcgctctccatcacccgcaccagcccgttaagcggcgcgcctgactgacgtaccgggttgccgttcttaaagtagactgcggaggtttctggaatattaaccagcgggtaatccgaggccgggctgtccatcggcatcagcagtggatcaagcaactgagcggcaggaatatcctgcgccgccgcctcatcgaccagcgcctgcagctgctcgagggtcaccatccgctcgaccgggtatttgcttaccgccaggcgacgcaggaaaatcacgtgcgcgccgcagccgagcttctcacctaaatcatcgataatcgtccggatgtaggtgcctttcgagcagtggatctccagctccagctcatcgccttcgcggcgaataaacagcagctcatagacggttatcggccgggcttcccgcggaacttcaataccctggcgagcatattcgtatagcttcttgccctgatatttcagcgccgaatacatcgacggcacctgctgcgtctcgccgcggaagctgtccagcgccgccgccagctgttcgtcgctaaaagtcagcgggcgctcttccaccacctgaccgtcggcatcggaggtatccgtgcgctggccaagtttggcgatcacgcggtaacgcttatcggagtccagcagatactgggaaaacttggtcgcttcgccaaggcagatcggcagcataccggtcgccagcggatccagcgcgccggtatgcccggcgcggttggcgttataaatacgttttactttttgcagcacatcgttactggaggcgccctgaggcttgtccagcaacaatacgccatgcacgtcgcggccgcgacgacgaggacgactcatcagtcctccttgctgtcgtccgggttcacacgacgctcatcgtcgtgtttcaccacgctggtgaccaggttggacatacgcatcccttccaccagtgagttgtcgtagaagaaagtcagttccggtacgatgcgcagacgcatcgctttccccagcagagagcggataaagccagaagcttcctgcagcgctttgatgcccgctttcaccgcggcttcatctttgtcgttaaggaaggtgacatacaccttggcataggccaggtcacgggacatttccacaccggaaacggtggtcatcatgcccagacgcggatctttaatttcacgctgcaggatgatggcaatctctttttgcatctcctgggccacacgctgcgggcgaccaaattctttcgccataataagttctccagaataaagacaaaaaaggggccaaaagcccctttttaaaatgattgccgggtggcgcttcgcttccccggctgcttagccatcaaatgattaatcgatgctacgctggatttcgatgatttcgaacacttcgatcatatcgccaacgcgaacgtcgttgtagttcttcacgccgataccacattccatgccgttacggacttcgttaacgtcatctttgaagcggcgcagggattccagctcgccttcatagataaccacgttgtcacgcagaacgcggattgggttgtgacgtttgatcgtcccttcagtaaccatacagcccgcgatggcgccgaatttcggcgatttgaagacatcacgcacttcagccagaccgatgatctgctgtttcagttccggagacagcatgccgctcatcgccgctttcacttcgtcgatcaggttatagatgacggagtagtaacgcagatccaggctttccgcttcgataactttacgcgcagaggcatcggcacgaacgttgaagccaaccagaatcgcgttggatgctgctgccagggtagcgtcggtttcggtgataccacctacgccggaaccgatgatcttcactttcacttcgtcggtagacagtttcagtaaggaatcggaaatcgcttcgacagaaccctgtacgtccgctttcagtacgatgttcacttcgtgaacttcgccttcggtcatgttagcgaacatgttttccagtttagatttctgctgacgcgccagcttaacttcacggaatttgccctgacgatacagcgccacttcacgcgcttttttctcgtcacgcactacggtcacttcatcaccggcagccggcacaccggacaggccgaggatttccaccggaatggacggacccgcttccagcacttcgcgacccagttcgtcacgcatcgcgcgcacacggccatattcgaagccgcacagaacaatgtcgcccttgtgcagagtaccttcgcgaaccagaacggtagctaccggaccacgacctttatcaaggaaggattcgatgaccgcgccgctcgccataccgttgcggaccgctttcagctcaagaacttcagcctgcagcaggatcgcgtccagcaggtcgtcgatgccggtacccgctttcgcggaaacgtggacgaactggctctcgccgccccactcttccggcaggatgccgtactgggacagttcgttcttcacgcgatccggatcggcttctggcttatcgatcttgttcaccgccactaccaccggtacctgcgccgctttagcgtgctggatagcttcgatagtctgcggcatcacgccgtcgtctgccgccaccaccagaaccacgatatccgtcgcctgcgcgccacgagcacgcatggaggtaaacgcggcgtggcccggggtatccaggaaggtgatcatgccgttgtcggtttcgacgtggtaagcaccgatgtgctgggtaataccacccgcttcgccggaggcaaccttggtagaacgaatgtagtccagcagcgaggttttaccgtggtcaacgtgacccataatggtcacgaccggtgcgcgcggttcagccgccgcgccggtgtcacggtcgctcattacggcttcttccagttcgttttcacgacgcaggataactttgtggcccatctcttcggcaaccagctgtgcggtttcctggtcgatgacctggttgatggtcgccatggcgcccagcttcatcatcgctttgatgacctgagaacctttcaccgccatcttgttagccagttcgccaacggtgatggtttcgccgattacgacgtcacggttaacggcctgcgctggcttctggaagccctgctgcagagcggaacctttacggtgcttaccgcctttaccgccgcgcacggccgcgcgggcttcttcacgatcagctttcgattcagcgtgtttgttgcctttcttcgccggacgagccgctttgctgctacggctacggccgcgaccgccttcgacttcacgatcgttatcatcttcagcctgacgagcatgctgtgatgtggtgacgtgatagtcgctgctatcttccgggctgtctgaggtttcagaccaatttttttcgttttcttcagccatacggcgtgcttcttccgctacacggcgcgcttcttcttcaagtttgcggcgtgcttcttcttccgatttgcgcttcaattccgcggcttcgttctcgcgacggatcttttcagcctgggcggttttggtcatttcgtcggtatgttgattgctcactttgtctttttccgcagcttcacgtttcgctttatcagcgacttcacgtttagcttgttctgcggcctcacgttcagcttttaattgcgcctcgcgtttcgctgcttcttcagcttcacgacgggcctgctcttccgcttcacgctgcgcctgctcttccgcggccaggcgttcagcctcttgcggatcgcgtttcacaaaggtgcgtttcttgcggacttcgatttgtaccgatttactctttccaccggtacctggaatatttaacgtactgcgcgtcttacgctgtaacgtcagcttgtctggcgccgagccgtgttcacggttcaggtgcgtcaacaaagtttgtttctcttgcgaggtcacagaatcatcagccgatttgcggatgcctgcgtcagcaaattgctgtatcaggcgatccacagaggtctgaatctctgaggccagcgctttaatagtcacatctgtcatgctgttccttcctgctacagtttattacgcttcgtcgccgaaccaacaaatgttgcgagcggccatgatgagctcgccagctttctcgtcggtcatcccttcgatatcagccaggtcatcaacgccctgctcggcgagatcttccagcgtacaaacaccacgggcagccagtttgaatgccagggcacgatccagaccttcgagattcaacagatcatcggcaggtttgttatctcccaggctttcttcctgagccagcgccagcgtagtcagtgcgtttttcgcacgctcacgaagtgcttcaacggtggcttcatccagaccgtcgatttccagcagttctttcatcggcacataggccagctcttccagcgaggagaagccttcttcaaccagcactgtcgcgaaatcttcatcaatatcaagatatttggtgaaggtatcgatagcggcatgcgcttccgcctggtgcttagcctgcagatcgtcaacggtcatgacgttgagttcccagccgctgagctgtgaagccaggcggacgttctgaccgttacggccgatcgcctgcgccaggttgcccgcttctaccgcgatatccatggtgtgtttatcttcatccaccacgatggacgcgacgtctgccggcgccatagcgttaatcacgaactgcgccgggttatcatcccacaggacgatatcgatgcgttcaccacccagctcagtcgacacggcctgcacacgcgcaccgcgcataccgacgcaagcgccaaccgggtcgatgcgcttgtcgttggttttcaccgcgattttggcacgagagcccggatcgcgagccgccgctttgatctccagcacttcttcaccgatttccggcacttcgatgcggaacagttcgatcagcatctcaggtttggaacgggtgacgaacagctgggcgccacgcgcttccggacggacagcgtacagtacgccgcgaatgcggtcgcccggacggaagttttcacgcggcagcatatcttcacgcaggatcacggcttcagcgttgttacccagatccagtgtgatattgtcgcggttcacttttttcaccacgccggtgatgatctcaccttcgtgctcgcggaactgatcgaccaccatcgcgcgctcggcttcgcggactttctgcacgataacctgcttagcggtctgggtggtgatacggtcgaaggtaacagattcgatctgatcttcgacatagtcgccgacgttcatgctttcatcttcgaaacgcgctgcttccagcgtgatctcgcgcgtcggctgggtgacttcttctacaaccagccaacgacggaaggtatcgaaatcgccgctcttgcggtcgatttcaacgcgaacgtcgatctcttgttcgtattttttcttggtggccgttgccagcgcgctttccagcgcttcgaaaattttctcacgcggcagcgctttttcgttggaaacggcttcaacaacagccaaaatttctttgttcatcggggcctttcacctcaatccagactgttaaaagtggggaaccaggttcgccttctggatgttactcagcgcgaacacttcatctttgccttcgacggttaccgtgatcatctcaccgtctaccgctttgataatgccctgccatttgcggcggttctgaaccgccatgcgcagcaccagcgcaacttcttcgccggtgaaacgttgatagtgttcggcggtgaacatcggacggtcaagaccaggcgaagagacttccaggttgtaagcgacagtgatcgggtcttcgacatccatgacggcgcttacctggtggctcacatcagcacaatcatcaacgttgatgccatcttcactatcaatatagatgcgcagtgtggatgtgcgaccgcgaataaattcgatgccgaccagctcaaagccaagcgcttcaaccggcgcagtgagcatctctgtcaatttttgctctaatgtggacaaacccacccccaagacataaaaaaagggcgtatagcccagttattctgaagtcagataacaaaaaaccccgataaatcggggctttagataactgaaccctgagatcgccatggcgatctggaacaccttccgcaagaattctttcaaattcggctacgaaggacacctagtcctcacagtatatttgaaaaagtacttaatgggaaagtggttgcgggggccggatttgaaccgacgaccttcgggttatgagcccgacgagctaccaggctgctccaccccgcgcctgaaacgtggcatattttactctttttgagcaaaagacgcaaatactgctgggatttggtaccgaagacgggacataaaatcgagatgaattgtaacggcgattagtatattttgtcaacatgctttttagcgcccccgattgccgtttgtgctggtatttcaggcttttttagcaaaaagatgatgaagcacttcctgtcgccagtaaaagatggttaaatgaatactcacaattaatgcataaaaatgcagttaaggttgttgggtcgaactcaccacagtctatcgagcagggttttattttatgacgacgattctcaagcatctcccggttggtcaacgtattggtatcgctttctctggtggactggataccagcgccgcgctgttatggatgcgcaaaaaaggcgccgtgccttatgcatataccgctaacctgggtcaaccggacgaagacgactacgatgctatcccgcgccgcgcgaaagagtacggcgctgaaggcgcccgtctgatcgactgccgcaaacagctggtcgcagaagggatcgccgcgattcagtgtggcgctttccataacaccaccggtgggttgacctacttcaacaccacgccgctaggccgcgcggtcaccggcaccatgctggtggcggcgatgaaagaagacggcgttaacatttggggcgatggcagcacctataaaggcaacgatatcgaacgtttctatcgttacggcctgctgaccaacgctgaactgcagatttacaaaccgtggctggacagcgactttatcaatgagctcggcggtcgtcacgaaatgtccgaatttatgatcgcctgcggctttgattacaagatgtcggtcgagaaagcctactccaccgactccaatatgctcggcgcgacccatgaagcgaaagatctcgaattcctgaactccagcgtcaagatcgtcaacccgattatgggcgtgaagttctgggacgaaaacgtgaagatccctgcggaagaggtcaccgtacgctttgagcagggccatccggtggcgctgaatggtaaaacctttgccgatgacgtcgagatgatgctggaagccaaccgcatcggcggtcgtcacggcctgggcatgagcgaccagattgaaaaccggattatcgaagcgaaaagccgcggcatttatgaagctccggggatggcgctgctgcatattgcctacgagcgtttgctgaccggtatccataacgaagatacgattgagcaatatcacgcccacggtcgccagttgggccgcctgctgtatcagggccgctggtttgattcccaggcgctgatgctgcgtgattcgctgcagcgctgggtcgccagccagatcaccggcgaagtcaccctcgaactgcgtcgcggtaacgactactcgatccttaatacggtatcagacaacctgacctataaagcggagcgtctgaccatggaaaaaggcgattccatgtttactgccgaagaccgtatcggccagctgaccatgcgtaatctggacatcaccgatacccgcgagaagctgttcggctatgcacagtctggcctgctgagcgcctcctcggcaaccggtttaccgcaggttgaaaatctggaaaacaaaggcaaataatcgcctgacaatgttgctttccgccggcggatcaccgccggctttttattttgaatgacccaccaacgtaaaaaaaatgccatgacgcattttttccttatcgccagaccagcaaaactgttgactataatagcctcaattgattaattcatatctggtgatacacatcatgaatattaaaccgccgatcaggccgcaaaagaccattgaccgactgatcgatgtacttgagccacacgcgacacccgttaacgcgatcgccagaaaaagactgacatgggaatataaaggcaaaacccagctctttatttttaaaaaaggcgagctgtcgattattcgtaattccgacaggctactgatggtgaccgtctatgagccgcatcttttcggcgtgacggaaatgctgcagcccagccgcagccacagcctgcgagccgaggtatcatgcgaactgctacggatcgactatgacctggcttcggcgctttttcgtcagcataacctgtgggaagaggtgaccagcctgttggcttatcatacctcgtatatggtgtatcgtgacgatctggtcctgcagcagcgtacctattcggtcatccgtaaccatttgctggagatgatgctattaagcgaagagacccgacagcgagtatctattcttgagtatattcaggacaggacccttctgtcgcgtagcagtattctcaatgtattgtcagcattaaagaaaggcggttatattacctttgcccgcggcggttatttacaaaatatcgtctcacttcctgaaaaattctgacccgcactcctcctatcatttattgttatttgctgcagcggggaagatgtttaaatttaaaccaataaccgttaccgctaaaagaacaaaaattttatgctaagcgcctgggtttcccggaagacaatctattactgagttcgccagcagacgaccacaaacggcgttaaccgccgggtctgcaccggctcaggatatgccagcggaaatcggccagacgtgtgcggcggtagcgagagttgccccctcgcctgccgcgaccataacaatgagatgcacgaacccgttaattatgcccgaacgcccatatcgggcttttttttatctgaaggaatttaataatgaagtctattgctgcaaaaatggttgccgtaacgatcgctttgggagccagcagcgctgcctgcgcagccgttaacctgcatggagaagctggcgccgagtttaccaatctgtccgccagctttggcgccggggaaccgggtatgacgttcagttctcagtgggcccatagcgacaacgacggagatagtgtaggactgggaatgggttataactttaaccttggcccttttctgatgaccctgggcggtaaggcggtctatctgaatccaaaagatggtgatgaaggttacgccatcgccgccggtggtggcgctgaactcccccttggtcagtatttcacgcttttcggcgagggctattactcaccggactcaatgtccagcggcgttgaggattatgtggaggccaatgccggggtacgccttaacgtgctcccatctctgaatatcgaagctggctatcgctatattgatatggcagggaaagatggcaatcgcgataacacgctggccgacggcgcttacgccggggttaacttccgcttttaactcttcacagggattgccggtcggcagtccctgtttcattctcagctggtcagcggcacgcttttcagtacgcggttgatctcttgtaggcccgcaacattattctctttgcggtaaacctcattcatggacgccatctgctccaggcgggtcagggcgccatacaccttatacgcctcgctgtgtctgtcgaacacatcgcggcgctccacgtcctgcagataatgacttttcaacgaatggttaaggcgactaatcagtgccgtattgtcctggaaatagcgcctcaccgcctgggcatgattcgctgtagtcccagactcactgggcgataccggtacggttagcgcattaatcgtctccaccgtttgggagggcgatgttgaactgcacccagctaaaccgagcacgccggcgacgataagcaacccgatcttgttcattgtgtcacttcacctctgttaatttgacgaggcgactttaacgacagtaaaaggaggcaaccagcgaagagatgtttataaataaatggccagcggggacaaaaacaaaaaaagacgcttttcagcgtcttttttctggaatattggtaccgaggatgggactcgaacccacaagcccgttagggcactaccacctcaaggtagcgtgtctaccaattccaccacctcggtacagaatacttagtgcgggatatcgctggtcggctgagccggcgcagttggctgagtttgctccgttttcggcgcgctcagattatcccactcacttcctttactggtcttgttgctgttgatattacccagcgccagactgatgatgaagaacagcgcagccaggatgccggtcatacgggtcataaagttgccagaaccgctggacccaaacagtgtgccggaagcgcctgcaccgaaggaggctcccatatcagcgcctttaccttgctgcagcataaccagacctacaaggccaatcgctacaataaggaaaacaaccaaaagagcttcgtacataatcaacctgttccttgcggattcgccgcataccaagtgcttcgaccaataaagcgggacgttttaacgtttcccactgaagcgggtgtgaatactaaccaaagcgaatgaccttcgcaagggcaatttcgacacattgtatcaactgcagaaaaaaacagcaaaaagccaattttcgatcataaaaaaggcggcaagcgccgcctttttaaccacttagccggcaaagctaaacgctttttaccgcctcagcgatgcggtgcgcaaactcgtgcacctgatcttcatgctcgccttccaccatcacgcggattagcggctccgtacccgatttacgcagcaggacacggccgcgttttcctaacgccgcctccacttccgcggtcaccgctttgacatgctcattctccagcggattaccgctgccctcggtaaagcggacattcaccagcagctgagggaacattttcatcccgctgcacaggtcatgcaggctcatgtggttgcggaccatcgccgcgaccacctgcaggctggcgacaatgccatcgccggtggtggttttatccagcaggatcacatggccggagttttccgcaccgatgcgccagcctttttcctggagcatctccagtacatagcggtcaccgaccttcgcgcgggcaaacgggatgcctaactgcttgagcgccagctccagccccatattactcatcagcgtgccgacggcgccgccgcgcagctgcccctgacgcaatccttcccgggctatgatatagaggatctggtcgccatcgactttattgccttcgtggtcaaccataatcacccgatcgccatcgccgtcgtaggcaatacccagatcggctttttccgccagcacgcgcgcctgcagcgcccgcacgtcagtggcgccgacctcttcgttgatgttgagaccatctggctcgcagcccatcgcgataacctgggctcccagctcgcggaagacattaggggcgatgtgataggtcgcgccgtgcgcgcaatccaccaccactttcagcgttcccaggctcagttcgttgggaaaggtacccttacaaaattcaatgtagcgccccgccgcatcgacgatacggctggctttgcccagctcagccgaatccacgcaggtgagctctttctccatttcggcttcaatcgcctcttcgacatcatccggcagtttggtgccctcaatggagaagaatttaatgccgttgtcgtagaaagggttatgtgaagcagagataacaatccccgcctcggcgcggaaggcgcgcgtcaggtaggcgatggccggtgtcggcataggcccggtgaacgacgcagagagccccgctgccgccagtccagcttccagcgccgattccagcatatagcccgaaatacgggtatccttgccgatgataattttacgcgaaccgtgacgcgctaacactttgcccgccgcccagcccagcttgagcacaaactccggagtgatcggcgcatcgccgacgcggccacgaataccatcggtgccaaaatacttgcggttactcataacgtttttttcccttagcggcgagggtggcttccaccacgcgcagcgcttctaccgtttctttgacatcatggacgcggataatctgcgcgccctgcattgctgcaatgacggcacacgccaggctgccgttcagccgctccgacggcccgacgttcagcaactgacctaccatcgacttacgtgacataccgaccagcagcggcagaccaaagtgatgaaactccccaagcctggccaacagttggtaattgtgggagagatttttaccgaaaccgaatcccgggtcgagcagcaatttttcttttgcgatccccgcctgttcgcagcgcacaatgtgctcattaaaaaaaagctcaacatcggcgaagacgtcctcatacttcggcgcctcctgcatggtttttggttgtccctgcatatgcatcagacacactggcagtccggtttccgcggcggcctgcagcgcgccgggctcggtcagcgaacgaatatcgttgatgatatgcgccccggccctggccgattggcgaataacctccgccttggaggtatccactgagatccatacctcaaagcgctgggcaatggcttcaaccaccggtatcacccgcgcaagctcctcttccacactaacctcagccgcccctggccgcgtcgattcaccgccgatatcaatgatggtcgcgccggcgttgatcatcagattggcatgcttcaccgcctcaatcagcgaattatgggcgccgccatcggagaaggagtcaggcgtcacatttagaatacccatcacgtgggggtgagagagatcgagggttgagccctgggctacaagtttcatcacaaaatccctgagactgaagaggttaaaaaagaaaaaccccggagcggacgcccggggttttaaggttaaacaagcatcaacagcggtagcttacttgtcgcccagctgctctgacatggtgttgcccgggttcggcgtacgcggttcatcaaccggacgcggcgcacgaggcgtgccattgttgtcagagttgttagaagaaccaggttcttcccaacccgctggcggacgaacttcgcgacgagccatcaggtcgtcaatctgcggcgcatcgatggtctcatacttcatgagcgcatctttcatcgcgtgcagaatgtccatgttgtcgttcagcagctggcgagcacgaccgtagttacgctcaatcagcgatttcacttcctggtcgatgatacgcgcggtttcatcggacatatgcttcgctttcgcgacgctacggccgaggaagacttcaccctcttcttccgcatacagcagcggaccgagtttgtcggagaagccccactgggtcaccatgttacgcgccaggttcgtcgccactttaatatcgttggacgcaccggtagaaacatgttccggaccgtagataatctcttccgccagacgaccgccgtacagggtggagatctggctttccagtttctgacggctggcgctgattgcatcgccttccggcaggaagaaggtcacacccagcgcacgaccgcgcgggataatcgtcactttgtgcaccggatcgtgctccggcaccaggcgaccaataatcgcgtggcccgcttcatgataagcagtagactctttctgcgcttccgtcatcaccatggagcgacgttccgcacccatcatgattttgtctttcgctttctcgaactcaaccatcgacacaacgcgtttgttaccgcgggcagcaaacagcgccgcttcgttgaccaggttggccagatccgcaccggagaagcccggggtaccgcgcgcaatgattgccgcatcgatatccggcgccagcggaacgcgacgcatatgcactttcaggatctgctcacgaccgcgaacatccggcaggccaaccaccacctggcggtcaaaacggcccggacgcaacagcgcggggtcaagaacgtccggacggttagtcgccgcgataacgatgataccttcgttaccttcgaagccgtccatctcaaccagcatctggttcagggtctgctcacgttcatcgtgaccaccgcccaggcctgcgccacgctggcggccgacggcgtcgatttcatcgatgaagatgatgcaaggcgcggctttcttagcctgttcgaacatgtcacgcacacgagaagcgcccacaccgacgaacatttcgacgaagtcagaaccggaaatggtaaagaacggtaccttcgcttcaccagcgatcgctttcgccagcagcgttttaccggtacccggagggccgaccatcaggacgcctttcgggattttaccgcccagtttctggaagcggctcggctcacgcaggtattctaccagctcgccgacttcctctttcgcttcgtcacacccggcaacgtctgcaaaagtggttttgatctggtcttccgtcaacatacgggctttgcttttgccgaaggacatcgcgcccttcccgccgccgccctgcatttgccgcataaagaagatccagacgccgatcagcagcagcattgggaaccaggagatgaagatggaagccagcaggctcggctcttctggtggttcgccaacaactttgacgtttttagtcaacaggttatcgagcagcttcggatcgttaaccggaatgtaagtcgtgtaacggttactatctttcttggtaacgttgatctcacgtccgttgatacgcgcttcgcgaacctggtcctgattgacctcttgcaggaaggtagaataatccaccttgcggccattcgactcgctgggcccaaagctctggaatactgacatcagcacaacggcaatgaccagccagagtattaggtttttcgccatgtcactcaagggattaacctcttattacaactgtgttaaaaacagcgtcaggatactctatatccagtttctttcaaactttcgtttgaaatctgccggttatggtttacgcccggtcgctacaatatacacttcacgcgaacgagcgcgggaagagtccggcttacgaactttgaccttcgtaaacagggagcgaatttctcgaagatactcatcgaagccttcgccctggaacaccttcactacaaaactaccacctggcgctaatacatcacgagacatttcaagcgccagttctaccagatacatagcccggggaatatccaccgccggtgttccgcacatattcggcgccatatcggacatgacaacttggactttactgtcgcccactcgctcaagtaacgctttcaggactaattcatcacgaaaatcgccctgaaggaagtccacaccaacgattggatccattggtaaaagatcgcaagcgatgatgcggccgctgttgccgatctgcgtgaccgcatactgcgaccagccaccgggagcagcaccgaggtcgactaccgtcatccccggcttaaaaattttgtcactttgctgtatttcatcaagtttaaaccaggcacgggaacgtaacccctttttctgtgcctgttgaacatatttatcgctaaagtgttcctgaagccagcggcttgagctggcagaacgctttttacctgtcatttaacattcccgttcgggttcatcgtactttactgcgtaaaaatcgacgcggtagtttggcgatatatgggagatggcggtagaatgacccgttttcaatcccaacgtaagcaaaaaaatacgatgaatctgagtactaaacaaaaacagcacctgaaaggtctggcacatccgctcaagccggtagttatgcttggcaacaatggtttgaccgaaggggtactggccgagatcgaacaagcgttagggcaccatgaactcatcaaggtgaagatcgcctcagaagatcgcgaaacaaaagccttgatcgtggaagccatcgtacgcgaaaccggcgcctgtaacgtacaggtcatcggtaaaacgctggttctgtaccgcccaacaccagagcgtaaaatctcgctgccacgctaagaatatcctgaatctcgacacaactttgtgtaaaacgagggatttctgcggccaggcgagcaaaatgccatgctcctgacgttgataaaaggccgctatgcggcctttttcctttctttacaatctataaacatcgtagcgggaaatacgccttacaggtattcaaccttggtaatttcgtattccacttccccacccggggtacggatagtcacgacgtcatcctgctctttgccgatcagaccgcgggcgatcggcgagttcacggagatcagattctgcttaaaatcagcttcgtcatcgcccacgatgcggtaggtctgttcctcgtcggtatcgaggttcagcacgctgacggtagaaccaaaaatcacccggccgttgttcggcattttggtgatatcgataacctgcgcattagacagcttcgcttcgatatccttgattcgcccttcgcagaaaccctgctgctcacgcgcggcgtgatactcggcattctctttcagatcgccgtgttcacgggcctcagcaatagcggcaatgatttcaggacgacgcacagacttcagataatccagttcttcgcgcagtttttcagcgccacgtaaggtcatcggaatcgcttgcattagttatacctctttatcattccttcagggaacggatagctccgctccgccacctgtcctgcccacgggcaggacacgagcaaaaagaaaccgacccgggaaacactccccaggtcagcagcaatttttcatttgatgggtattttaccccgaagttcattatgggtcatcgtttactttactgggcgttgcaccgtagtatgacggcctggcttcaggttgttagcgcgagattatgcgatttcccagatttatcatcggattgaccgccggtatagcgcttagcgctcaggcggcgaatattgacgagtacatcaaccagcttcccgccggtgcgaaccttgcctttatggcgcaaaaggtcggcgcatcgacgccggaaatcgactatcacagccagcaaatggcgctcccggccagtacgcaaaaggtcatcaccgcgctggcggcgctgctgcaactggggcccgattttcgctttaccaccacgctggaaaccaaaggttcccttgacggcggcgtgctgaaaggcgacctgattgcacgcttcggcggcgatccgacgcttaaacggcaggatattcgcaatatggtggcgacgctgaaaaaagccggcgtgcagcgtatcgaaggcaatgtgctcatcgatacctcggtcttcgccagccatgacaaagcgcccggctggccgtggaacgacctgacgcagtgcttcagcgccccgccggcggcggcgattgtcgaccgtaactgcttctctgtctcgctgtatagcgcgcagaaaccgggcgatgtcgccttcattcgcgttgcatcctattatccggtcaccatgttcagccaggtacgaacgctggcgcgtggctcatcggaagcccagtattgcgagctcgacgtggtgccgggcgatctcaatcgctatactctcaccggctgcctgccgcagcgtagcgagccgctgcctctggccttcgccattcaggatggcgccagctatgccggagcgatcctcaaagccgagctggcccaggcggggatcacctacagcggcacgctgctgcgccagacgctggccaatgagcccggcaccgtgctggcaaccagccagtcggctccgctgcacgatctgctgcggatcatgctgaagaagtcagacaacatgattgccgacaccgtctttcgcaccatcggccacgcccggttcggcgtacctggcacctggcgggcgggctccgatgccgtacggcagatcctgcgtcaacaggctggggtcgatctcggcaacactatcatcgccgacggctctggcctgtcgcgccacaacctgatcgccccggcgaccatgatgcaggtgctgcagtatatcgcccagcacgataccgagctcaacttcatctccatgctgccgctggcgggccatgacggatcgctgcagtatcgcgccggtcttcatcaggcgggcgtcgatggtaaagtttcggcgaaaaccgggtcgctccagggggtttataacctcgcaggcttcatcactaccgccagcggacaaaagatggccttcgtgcaatatctctccggatacgccgtggagccagctgatcagcgcaatcgccgcatcccactggtccgctttgaaagccgcttgtataaagatttgtaccagaacaattaaaacaaaagggccgcatcagatgcggccctttttgatccagagaagtcaggattagcgtttgtagatgaattcgacgccttcttcgtcgtcctcatcccagtcgtcatcccagtcttcgtcatcttctgcttcggcttcggcctcttcaagctgctgacggtgatagtcgtcccacataaactcgactttctccggcttctgctcttcttccgcctggacgatcgggttttcgatgatgaaggtcatcacgtcccagcacagctctttcacgccctgctggctggccgcggagatcaggtagaatttctcttcccaacccagcgcttcggcaatcgctttggctttggcttcggcttcggccttgtccatcaggtcaatcttgttgaaaactaaccagcgtggtttggaggctagcttctcgctgtatttctccagctcgccgatgataatgcgcgcattctcaaccggatcggagccgtcgatcggatcgatatcgatgaggtgcagcagtacgcggcagcgctcgaggtgcttgaggaagcggataccgaggcctgccccttccgctgcgccttcaatcagccccgggatatcggcaactacgaagctcttttcattgtccatacgcaccacgcccaggcttggcaccagggtggtaaacggatagtcagccactttcggcttggcggcggagaccgcacggatgaaggtggatttgccggcgttcggcatgcccagcatcccgacatcggccaacagcatcagctccagctgcaggtcgcgtttatcacccggggtacccatggttttctgacgcggcgtacggttaacggacgatttgaaacgggtgttgcccaaaccgtgccagccgcctttcgccaccatcagacgctgaccgtgtttggtcatatcgcccatggtctcgccggtgccctgatcgataacccgggtgccgaccggcacttttaccgtcacgtctttaccgcgcttaccggtacagtcgcggctttgaccattctgcccacgttcggcgcggaacgatttttcaaaacggtagtcgatcagggtgttcaggttctcgtccgcttccagccagacatcgccgccatcgccgccatcgccgccatccggaccgcctttcggaatatacttttcgcggcggaagcttacgcaaccattgccgccgtcacctgctacgaccaggatcgttgcttcatctacaaacttcattttactctccgtaaatcattcgcctgagcggggcagcggtactaccgcctctcgcttacgccaacgtccccaaagacgatgaccgatggcggaatacatcgcgcccgcaaccacgacaaacgcaccgagataaccaatcaggtttaacatcggtctggcgaaaacatcgggccaggccattgataataaatcagaaaacagtagcgtaaacagtggcgtcaaggtgattaacgcgctgacctgcgccgcctgccagcgcgccatggcttccgccagcgccccgtagccgaccagggtattcagcccgcaaaaaatcaggcatgccagttgccagctgcttaaccgggaaatcactccgggctcagcaagcggcaataatgcaatcgtacacaaagtgtacagcaaaaatagtatctgctgtgatgccagacggcgcaataacaccttttgcgcgacgccgtagcttacccacaccgtagcggcagcaacgccgaaaattacccccacgtgtagtccgtcaggcgggtaaagatttcaatcagactggtattgaagaacatcaccagcccgctgagcagcatcaacgcgcccaccacctgggtgccgcgcatgcgctctttcagaattacgacgctagccaccatcatccccaccggcgacagctggccgatgacctgagaagccgtggggctgaggtattgcagggaagaactaaacaggatgaagttaccgaacagaccgccggtggcaatcgctaataacaccagccagcgcggcttgcgaaaaattcgcatcggcggcagtttgcctttgatcgcgaggatcgcgccaagcccaatgctggccatcaggaagcgataaaagaccaccgtaggcggcgccatcacctcgagaacctgtttcattgcaatcggcaacgctccccaacacatcgcggtggtaagcgccagaataatgccaatcccagcctgctgcttcatgcctgtttccctgcaaaaattttccggtagacgaatgtaaaaagccccgcaacgtgttgcggggctttcatccgttaccgggacgcgaaaaacttattcagcaacgatgctgatgaatttacggtttttcgggcctttaacttcgaacttgactttaccgtcagtcaaagcgaacagagtgtggtcacggccgcaaccaacgttggtaccagcgtggaatttagtaccacgttgacgaacgatgatgctacctgccagaactgcttcaccgccgaaacgttttacgcccagacgtttagcttctgaatcgcgaccgttacgagtcgagccgccagcctttttatgtgccatttaaatctactcctcaggtcttaggcgctgatgccagtgattttcacatcagtgaaccactgacgatggccctgctgcttacgatagtgtttacgacgacgaaacttaacgattttaactttctcgccacgaccgtgagcaacaacttcagctttgattacgccgccctcaacgaaaggaacgccgatcttgatttcttcaccgtttgcgatcatcagcacttcagcgaattcaacagcttcgccagttgcgatgtccagcttttccaggcgaacggtctgaccttcgcttactcggtgttgtttaccaccactttggaaaaccgcgtacatataaaactccgcttccgcgcacctctttatgtgattcagagtgcgctataaatattcacaatagggcgcgaatattacgcaaaacgcgagcctttgacaagagcgattagcgatcaatgcagaaaaaaaacacaactttcacgacaacgtttatctacggcaatttttcagtacaatcatatcttcttttaattctgtcttaatccttctgtgatcccacctggattcatggtaacaggacatttggcccggcttttgcgatgaatttagaaaaaatcaatgagttaaccgcgcaagatatggcgggtgtcaatgcgacgattcttgagcaactcaactccgatgttcagcttatcaatcagttaggctattacatcgtcagcggcggcggcaaacgcattcgcccgatgattgctgtgctcgccgcacgcgcggtgggctatcaggggagcgcgcatgtcaccattgccgcgctgattgaatttattcataccgccaccctgctgcatgacgacgtcgtcgatgagtctgatatgcgtcgcggcaaagccacggccaatgcggcgtttggcaatgccgccagcgtgctggtcggcgattttatctatacccgcgcctttcagatgatgacccagctgggctcgctgaagatccttgaggtcatgtcggaagcggtgaacgtcattgccgaaggcgaagtgctgcagctgatgaacgtcaatgacccggatatcaccgaagagaactacatgcgcgttatctacagcaagacggcgcgtctgtttgaagctgcctcgcagtgtgcgggactgctggccgactgcactgcggaagaagagcgcgcgttgcaggattatggccgctatctcggcaccgctttccagctaatcgacgatttactcgattatagctctgacggcgagcggctcggtaaaaacgtcggtgacgacctgaacgaaggtaaacccacgctaccgctgctgcacgccatgcaccatggcacacccgatcaatcagcgatgatccgcggtgcgatcgagcaaggcaacggccgccatctactggatgctgtgctggaaacgatggcgacctgcggttcgctggaatggacgcagaagcgtgccgaagaagaagctgacaaagccattgccgcgctgcagatcctcccggacacgccctggcgcgaagccttgattgggctggcgcatattgcagtccagcgcgatcattaatcccccctcctttcccgcgcgacgcgcgggaaagttccagtaaaatgccatttctctccctaaaattccgaatatcttgatagattctgaatattccggcgctttaacagaacttgttagaaccctacatagtacgcgggtatagtgtctctatcgcccatgtgggacgatctggacctttaacaccaggagaatttatggataagttcatcgactggcatcccgcagatattgttgcgggattacgtaaacggggaacatcgctggcggcagagtcgcgacggcacggactaagttcttcaacgctggcgaacgccctgacccgcccctggccgaaaggcgaattgattatcgccacagcgctggaaacgcagccgtgggtcatctggccgtcacgctaccacgacccggtgactcatgagtttatcgacagaacgcagatgatgcgtcagaagaagatcgacaagtgatgtgattgctcgacagcgccccggaacaacgtcccggggcgctgtcaggacgcggttactcgcccttcacgcgttgaatattggcgcccagggcctgcagtttatcttcgatacgctcatagccgcgatcgatatgatagatgcgatcgacgatggtggtcccttcagcgatacagccggccagcaccaggctcgccgacgcgcgcaaatcggtcgccatcacctgcgcgccagaaagctgcttcacgccgtgacagatagcggtattgctctcgatctccgcgtgcgcgcccatacggatcagctccggaatgtgcatgaagcggttttcaaagatcgtttcggtgatcacgccggtcccttccgctaccaggttaagcagcgtgaactgggcctgcatatcggtcgggaagcccgggtgcggcgcggtacgcacgttgaccgctttcggacggttgccgtgcatatcgaggctgatccagtcttcgcccgtttcgatgtcagccccggcgtcgcgcagcttcgccagtacggcatccagggtatccggctgcgcgttacggcagaggatcttgccgccggaaatcgccgcggccaccaggaaagtcccggtttcaatacggtcaggcagcacacggtagacgccgccgcccaggcgctgcacgccttcgatggtaatgcgatcgctaccctggcctgtgatttttgcgcccagcgcgttcaggaagttggcggtatcgacaatctccggctcgcgagcggcgttttcaataatcgtcgttccctccgcaagcgtcgctgcgctcatgatggttacggtggcgccgacgctcaccttatccatcacaatatgcgcgcctttcaggcgaccgctgaccgaggctttgacataaccttcttccagtttgatctcggcgcctagctgctccagaccgctaatatgcagatcgaccggacgcgcgccgatagcgcagccgccaggcagagaaacttgcccctgaccgaaacgcgccaccaacgggcccagcgcccagatagaggcgcgcatggttttcaccagatcgtacggagcacagaatacatcgaccgggccggcgtcaatccataccgaaccattgcgctcgaccttcgcgcccagctggctcagcagcttcatggtggtatcgatgtctttcagcttaggtacgttttggatctctaccggctcttcggcaagcagcgcggaaaagaggattggcagggcggcgttttttgccccggagatggtgacttcaccctgaaggcgagtcggcccctgaacacggaatttatccattgattctgttctctattaaaaattcacatacgctgcaggggatccccacagcttagaagccattgagtttgcggtctcgcgcccactcctgcggagtaaaggccttgatcgacagcgcatggatgcggttgtcggcaatatattccatcagcggcgcgtaaacgctctgctgctttttcacccgactcatgccatcgaacatctcacccacagcaataacctgaaagtggctgccatcgccagagacgtggacttcctggagggggagtgcgttcatcagcacggtctgaatttcatgattttccatgggctcaaatttatctgatagtgaaaacagcccaacatcttagaggaaagtggcgcggtcttaaacaagcaaaaagccccggcgaaaagattgccagggctttcggaatagcttcagtgctaaggcactgaaaagattatcagatcagatcggcaggcaggttgtaaagaccgatcagcgtttgcaggttttcgctcttgccgaccagctgcgcttcccggccctgacggcgaatcagcgccataaaatgcactaacagcgccaggcccgcggtgtccacgcgcgtggtctgactgagatcgatgatcgccgttcccgccgtcgcctgggcgcgcgcctcccagagcgggaccagcagatcctgatccagctccccgtgcagcgccagcgtctcgccctcgcgagtccagctcagctgcccgctcattattttttctgttccagggtgatcggctgcgcagagatcgctttcagctgcgcggtcaggccatcaacgcccttggtgcgcagcagatcgctccactcattctgtttggtggtgatcatgctcaccccttccgcgatcatatcgtaggcctgccagttgccggtctgggtatttttacgccactggaagtcaagacgtaccggcggacgaccgttcgggtcgatgatagtgacgcggatcggaacgatggttgcgctgcccagcggctgctccggagcaatctggtaagtctgcccatggtacatcgccagcgcctgaccgtaggcctgcttcaggtattcacggaaggcggcaaaataggcctcacgctgcgcaggggtcgcttctttgtaatagcggcccagcaccagcgcgccggcatatttcacctgtacatacggcaataactcctggtcgacgatgtcgcgcagatagttaggattagctttaatcttcggctgttcattcttcaggcgatcgaaggttttctgcgccgcttcattcatcagcttatacggattggactgatctgcggcctggacggcggtcagcggggcaatcaccagcatggcgaccatgagtaagcgtttaaacatatcgtatttctcctgaaattaatgcgtcgtgccggctgccggcgtcgcgtcagtatgaccttctgcctcggccttatcattgccagaattctgattgtcgccgcccttactgttataaaggaactgaccaatcagatcttccagcaccatggcggacttggtgtcctggatagtgccgccgtctttaaggatagtcgtcccgaggtccgggtcttcaaaaccgacgttcagcgccaggtactgctcgcccagcaggccagaggtgcggatcgccaacgaactggtatccgggatatggttgtagcgctcatcgatatcgagctccacgcgtggcagataggttttcggatcgagcgtaatgtccgctacccgccccactaccacgccgccgatgcgcaccggcgagcgcgccttcaggccgccgatgttatcgaaagtcgcataaaggcgataagtcggctcggtgcgtagcgaggtgacgttcgccgccttcaggcagacaaacagcgccgccagcagcgccaccagtaagaacacccctacccagatttcagtttttttcgtttgcatgaactcaattcccaaacatcagcgcagtcagcacaaaatccagccccagaaccgccagcgacgcatgcaccacggtacgcgttgtcgcccggctaatcccggcggaagtggggatagcgtcataaccattaaataacgcaatccaggttaccgtaatagcgaacaccagactcttaatcaggcagttcaccagatccattcgccagtcgacggcattttgcatcgcggtccagaaaaaaccaccgtcaatgcctttccagctcacacccaccagcgcaccgccccagatccctaccgcgacgaagataatcgtcagcagcggcagcgaaatgacaccggcccagaagcgtggggaaatgacgcgacgcagcggatccaccgccatcatctccatactggagagctgttccgtggcccgcatcaggccaatctcggcggtcagcgccgacccggcgcggccggcaaacagcagcgcggcgaccaccggccccagctcacgcagcagcgacagcgccaccagcatgccaagactggtctctgcgctgtaggtggttaacaccagatacccctgcagcccgagcaccataccgataaacaagcccgatacaatgataatcagcatcgacaggacgccgacgttatagagttgacgaaccagcagcggcgcgtgcttgcgaaactctggtttgccgacaacggcgttgaaaagcattaatccggcgcgtccaaacgtcgcggtggttttaataccgcgatgacctagcgcggccagcgcattaaacagcatgagtcgctcaactccctatgcctaataaatcatggtgatagtcgccagcaggataacggaacggcaccggaccgtcggcaataccatcaatgaactgacgaacccgaggatcggtattctcccgtagcgactgggcgctaccgtgggcgacaatctttttatccgccacgatatacgcgtagtccgcaatactaagcacctcgggcacatcgtgcgaaaccacgatgcaagtgacacccagcgtgctgttgagttcagaaatcagcttcaccagcacgcccatagtgatgggatcctgcccgacgaacggttcgtcgaacataatcagatccggctccagggcaatggctctcgccagggcggcgcggcgcgccatcccaccggaaagctcagaaggcattaacttcgccgcaccgcgtagccccaccgcttccagcttcatcatcaccgtcgtatgcagcagcgcaggcggcaaatgcgtatgttcgcgcagcggataggcaacgttgtcaaagacattgagatcggtgaacagcgcgccggactggaacagcatgctcatccgcttacgcaccgtataaagacgcgaacgcgtcatctgcggcacgttctcgccatcaaacaggatctctcccctgtccggcgggatctggccgccgatcaggcgtaacagggtagtcttgccgatccccgaaggtcccatgatcgcagtaattttaccgcgcggcaccgacagcgagatgtcgtcgaagatcacacgatcgccgcgtgaaaagcggataccgcgcacttcaactaaattcgcctgagtttggctcataaaatcatccttactaaacacctgacgggcaagcatggccctttcttgcgccacaatcacaacatttttacagaatcttacctgcacaggttagcgaaagctggcatttgttttacttttggcacacataaagtcaaaattaagaattcgttacgctgcgtagggataacccagcgaggcgacgattatacctgaagaaaggactttagatgctcttagcgacggctctgttaattattggtttattgctggttgtctacagcgccgatcgtctggtctatgccgcctccatcctgtgtcgtatgttggggatcccgccgctgatcatcggcatgacagtggtcagtatcggcaccagcctgcctgagatcatggtcgccaccgcggcctcgctgcacgggcagaccgatctggcggtcggcaccgcgctcggatctaatatcaccaatatcttattgatcctcggtctcgccgccttactcaggccatttaccgtgcattctgatattctgcgccgcgaattaccgctaatgttgctggtcagcgtgctggcgggactggtgctctacgatggacaactgacccgtctcgacgggctatttttactggcgttagcgcttctgtggctgctgttcaccatcaaaatcgctcgcctggcggagcgccagggaagcgatagcctgacccgcgaacagctggcggagctgccacgcgaagggtcgctgccggtcgccctgctctggttaggggtagcgatgatcgtcatgccgatggcgacccgcatggtggtggataacagtacagtgctggcaaactatttcgccatcagcgaactgaccgtcggcctaacggtggtggcgataggcaccagcctgccggagctggccaccgccatcgccggggcgcggaaaggggaagatgatattgccatcggcaatatcatcggcgccaatatccttaatatcgcactggtgctgggtttaccggcgctgatcgcgccggggagctttgcgaccgaagccttcactcgcgattatggcgtgatgctgctggtcagcctgatcttcgcagtgctgtgctggcgccgtcagcagcagccgggacgactggttggcgcgctgctggtcggcggctttgtggtttggttggcgatgctgttttggacagcaccgctcttcgttgaatgattcgggataacatcatgtcgcaaatagatttgcccacggattttgactttcaacaggcaggccgtcaggtgctggaaattgaacgtgaaggtctggcccagctcgatcaatacataaatgaagactttacccatgcctgcgaaacgattttccgctgcggcgggaaagtcgtggtgatggggatgggcaaatccggccacatcggccgcaaaatggcggcaaccttcgccagtaccggcacctcggcattttttgtccaccccggcgaagcggcgcacggtgatttaggtatggtcacccctcaggatgtggtaattgcgttgtcgaactccggcgaatcgaatgaaatcctcgcgctgatcccggtcctcaagcgccagcaggtgaagcttatctgtatcaccagccggccggagagcagcatggcgcgcgcggcggatatccatctgtgcgtgaaagtgccgaaggaggcctgcccgttaggactggcgcccacgtcgagcaccaccgccgcgctggtgatgggtgatgccctcgccgtcgccctgctggaagcccgcggctttaccgctgaggatttcgccctgtcgcatccgggcggcgcactcggccgtaagctgttgctgcgggtcaatgatattatgcataccggtgatgaaatcccgcacgtcggcctgcaggcgaccctgcgcgatgcgctgctggaaatcacgcgtaaaaatttaggcatgaccgctatctgcgatgacgatatgaacatcatcggtatttttaccgacggtgacctgcgccgggtcttcgataccggcgttgatatgcgcgatgccagcattgccgacgtcatgacccggggaggtatccgcatccgccccggcactctggcggtggatgcgctaaacctgatgcaatcccgtcatatcacctgcgtgctggttgccgatggcgaccatctgctgggtgtggtacatatgcacgatctgctgcgcgcgggcgtagtgtaagtaaggaaaaaataatgaataatgctgatgctcagttagcgacctgctacgggccggtaagccaggcgtttgtcgatcgcgcggcgaagatccgtctactgatccttgatgtcgacggtgtattatccgacgggcttatctatatgggtaatcacggcgaggagctgaaagcgtttaacgtccgtgatggctatggtatccgctgcgcgctgacctcgggtattgaagtggcgattattaccgggcgaaaagctaaactggtagaagatcgctgtcagacgctgggcatcacgcatttgtaccaggggcagtcggacaagctgctggcgttccgcgatctgacggacaaactgcacgtgcggccggaagaagtcgcctacatcggcgacgatcttattgactggccggtgatggccgaagtgggccttagcgtcgccgtcgccgatgcgcatccgctgctgctaccgcgggcgaattatgtcacgcggattaacggcggacgcggcgcggtacgcgaagtctgcgatttgttactattggcgcagggcaagttggatgaggccaaagggcaatcaatatgagtaaaaccagacgttgggttatcattttactgtcgctgctcgcgctgatccttatcggcctgaatctggcgaatacggacgacacggcccagccggaggtcaatcctaacgaccctacgtataaaagcgaacataccgacaccgtggtatacagtccggaaggcgccctgagctatcggctgattgccgagcacgtggaatatttttccgatcaggaggtctcctggtttaccaaaccggtgatgaccacctttgatactaacaaggtgcctacctggtcggtcagagcagacaaagcgaagctgacgaatgaccggatgctctatctttacgggcacgttgaggtgaatgcgctcgcgccagattctcaactgcgcaaaattacgacggataacgcccagataaatctggtaacgcaggacgttacctccgatgacatggtgacgttatacggcaccacatttaattccagcggcctgaaaatgcgtggaaaccttcgcagcaaaaatgccgagctgattgaaaaggtgagaacctcttatgaaattcagaacaaacaaactcagccttaagattgcgctcgccggcgcgttactggccgccagcctgccggccctcgccaagacgggcgataccgatcagccgatccatatcgaatccgatcagcagtcgctggacatgcagggcaatgtcgtcaccttcaccggtaacgtggtcgtgacccaggggacgatcaagattaacgctgataaagtggtggtcacccgtccaggcaacgagaaaggcaaagaggtgatcgaaggtttcggtaacccggctactttctatcagatgcaggataacggcaagccggtaaaaggccgggcgtcgaaaatgcgctacgagctgcagaacgattacgtcgtgctgacgggcaacgcttatctggaacagctcgacagcaacatcaagggcgacaagatcacctatctggtgaaagagcaaaaaatgcaggccttcagcgataaaggtcgacgcgtcaccaccgttctggtgccgtccgagctgcaggataaaagcggcaaccagcaaaagaagagtaactaatccgttatggcaaccttaactgcgaagaatctcgctaaagcgtataaaggccgccgcgtggtggaagatgtcagtctcaccgttaactcgggcgagattgtcggcttgctcggcccgaacggcgccggtaaaacgaccaccttctacatggtggtcgggattgtgccccgcgacgcaggcaatatcatcatcgatgacgaagacatcagcctgctgccgctgcacgcgcgcgcgcgacggggcatcggctacctgccgcaggaagcgtcgattttccgtcgcctcagcgtctatgacaacctgatggcggtcctgcagatccgtgacgatctaaccagcgaacaacgggaagatcgcgctaaagagctgatggaagagtttcatattgagcacctgcgcgacagcctcggtcaggcgctctccggtggtgaacgccgccgcgtcgaaatcgcccgcgcgctggcggcgaatccgaaatttattcttctggatgaaccctttgccggcgtggatccgatctccgttatcgatattaaacgcatcattgagcacctgcgcgacagcggtctcggcgttctgattaccgaccataacgtccgtgagaccctcgcggtctgcgaacgcgcgtatattgtcagtcagggacaccttatcgctcatggtacaccgcagcagatcctcgaagatgagcaggttaagcgcgtgtatcttggggaagacttcagactctgatagggtagaggttacagacgttttagccggagatatttaccctgaacatgaagcaaggtttgcaattaaggcttagccaacagcttgccatgacgccgcagctgcagcaggcgattcgtttgctgcagttgtccacgttagaactccagcaagagctccagcaagcgctggaaagtaacccgttgcttgagcaaaccgatcttcacgacgaggtagaggcaaaagaggtggaggaccgcgagtccctcgataccgtcgatgcgcttgagcaaaaagagatgcccgacgaactgcctctcgatgccagctgggatgaaatctataccgctggcacgccgtcgggtaacggcgtcgactatcaggacgacgagcttcccgtctatcaaggcgagaccacccagactctgcaggactatctgatgtggcaggttgagctgacgcctttcaccgacaccgaccgcgctattgccacctctatcgtcgacgccgtcgacgatacgggctacctcacgattcagattgaagatattgtcgacagcatcggcgatgacgagatcggcctggaggaggtggaagcggtcctcaagcgaatccagcgttttgatccggttggcgtcgcagcgaaagatctgcgcgactgcctgctgatccagctgtcgcaatttgctaaagagacgccgtggctggaagaggcgcggctgattatcagcgaccatcttgatctgctggccaaccatgatttccgcactctaatgcgagtcacccgcctgaaagaagaggtgcttaaagaggcggtcaacctgatccagtccctggatcctcgccctggccagtccattcagaccagcgaaccggaatatgtcatcccggatgtgctggtgcgcaaggtgagcggccgctggaccgtcgagctcaacgccgacagcattccacggttgaaaataaatcagcagtatgcggcaatgggcaacagcgcccgcaatgacgccgacggccagttcattcgcagcaatctgcaggaagcccgctggctgattaaaagtctggaaagccgcaacgataccctgctgcgcgtcagccgctgcatcgtagagcagcagcaggcttttttcgaacagggtgaagagtatatgaagccgatggtgctggccgatatcgcccaggccgtcgagatgcatgaatcgacgatttcccgtgtcaccacgcaaaaatatctgcacagtccgcgcggtatttttgaactgaagtatttcttctccagccatgtgaataccgaaggcggaggcgaagcctcgtcgacggcgattcgcgcgctggtgaagaagctcatcgccgcggaaaaccccgcgaagccgttgagcgacagtaagctcacctccatgctgtccgagcagggtattatggtggcgcgccgcactgtcgcgaagtacagagagtctttatccatcccgccgtcaaaccagcgtaaacaactggtctgacataaccgataaggaagacactatgcagctcaacattacaggacacaacgtcgaaattacgcctgcgatgcgcgaattcgttacggcgaagttcagcaagctggagcaatttttcgaccggatcaatcaggtctatattgtgttaaaagtagagaaagtgacgcaaattgcggacgcgaatctgcatgtcaacggtggcgaaatccatgccagtgcggaagggcaggatatgtatgcggctgtcgatggtcttatcgacaagctggcaagacagttaacgaagcacaaagataaactaaaacaacactaattgtccgggcccccttgcgcccgccgctggatatcatcggcgacgggcgcgggggcgctcaggtgaaattatgatgaacaacgattcggctctacaactgagcaacgtcctgaaccaggaatgtacccgtagccaggtgcactgccagagcaagaagcgtgctctggaaatcatcagcgaactggccgccaaacagttaagtttgccgccgcaggtggtgttcgaagcgatcctcacccgcgaaaaaatgggcagtaccgggatcggcaatggtatcgccattccccacggaaaactggaagaggatacgctgcgtgctgtcggcgtttttgtccagctggaaacccccatcgccttcgacgcgatcgacaatcaacctgtcgacctgctgttcgcgctgctggtgccggccgaccagacaaaaactcacctgcatacgctctccctggtggccaaacggctggcggacaaagcgatttgtcgtcgcctgcgagcggcgcagagcgatgaagagttgtatgagatcatcaccgaagcaggaagcagcgatgacgcataacggcagtcgcaccttatcctttatcgtactgaggagaaacggtacatggtactgatgatcgtcagcggccgctcgggctcggggaaatccgtcgctctgcgagcgctggaagatatgggcttttactgcgtggataacctgccggtcgtgctgctgcccgacctggcgcggtcgctggctgaccgcaatatctccgcggccgtcagcatcgacgtgcgtaacatgccggaatccccggagatcttcgagcaggcgatgcagaatctgccggaatgtttttctccgcagctgctgttccttgatgccgaccgcaataccctgatccgccggtacagcgatacccgtcgcctgcacccgctctccagcaagaatctgtcgctggaaagcgccatcgacgaagagagcgatctgctggagcccctgcgctcccgcgccgatctgatcgtcgatacgtcggaaatgtcggtgcatgagctggcggaaatgctgcgtacccgactgctgggtaaacgcgagcgtgaactgacgatggtcttcgaatccttcggcttcaagcacggtattccgatcgatgccgattacgtctttgacgtgcgctttctgcccaacccgcactgggatccgaaactgcgtccaatgaccggtctggataaaccagtggccgccttcctcgatcggcacactgaagtgcacaactttatttatcagacccgaagctatcttgagctatggttaccgatgctggagaccaacaatcgcagctatctgacggtggccattggctgtaccggcggtaaacatcgttcggtttatattgctgaacaactggctgactacttccgctcgcgcggcaagaacgtgcagtctcgtcatcggacgctggaaaaacgtaaatcatgaccgtaaagcagaccgttgaaatcaccaataagctgggcatgcacgcccgcccggcgatgaagctgttcgaactgatgcagaatttcgatgccgaagtactgctgcgcaacgatgaaggcacggaggcggaagccaacagcgtgattgccctgctgatgctggactcggcgaaagggcgacagatagaggtggaggccagcggtccgcaggaagttgaagccctcgccgcggtgattgccctgtttaacgctggctttgacgaagactaaacgtgacgcttcccggcgagggacgactggcgactgtaccagccccggcgccggagtaacccgctaatagagcttatgctcgcgcatgaacccttccccgcccagctgtcgcatctggcgtaagatccaggcctgacgactgcgcacatagcctgacggcgcatcggcgcgatagcggatcgggttcggcagcaccgcggccagcagagccgcttcccccggcgtcagctgactggcgggtttatgaaaatagcgctgggcggccgcttccacaccaaatatcccatcgccgaactcggcaatattcaggtagacggtcaggatccgctttttactccacacggtttcgatcccgactgtcagcccggcttccagccccttacgcagccagctgcggccatcccataaaaacaggtttttcgccgtctgctgcgacagcgttgacgcgccgcggatgcgggtctcgtgacgttcattgtgcgccagcgctttctcaatcgccgacacgtcgaacccccagtgtttcgggaacttctgatcttcggcggcaatcaccgccagccccatccatggagagatcttatccatggcaacccagtcggaatgcgccagataatggaaatcgccggacagccaggcgctcacctgccgctcaagcatcaccgccgaaaacggcaccggcagcacgctaaacagcgcgatccccccgccccagaaaacggcggcgatcagcagcagacgcaatgccagacgttttaatagcgcaaggggcgcaacgcggagcctcatgcgctcagcgccagcacgcgggccaccagcttctcaattccggtggcggcttgcgcaatgtcctccgccagcatatacgccggagtggtgaccactttgttgtcttcatccaccacgatgtcgtcgaccgggcaaggcacgtgctctgcccccatctcttccaccacatcggcggtatcaagatcggtcccaatggtcatccgcagcggaaacgcaaagatcttcggcagcatcgccggggcaatgcacataaagcccagcggcttgccggtctgatgcatcgccagcgccagggcccgcagatcgggatccacctggcattcgctgccctcggcggcgaagctgcttagatttttcgccgcgccgaagccgccagggacgatcagcgcgtccagcgtctccgcacgcgcctgcgccagcggcaggatgtcgccgcgggcgatacgcgctgcttccaccagcacattgcgctgctctggcatcgcctccccggttagatggttgatgacatcgcgctgcggtttatcgggcgcaaagcacactgcctgcgcgccgttgcgcgcgatcgccagcagggtaatcaccgcctcatggatttcactgccgtcgtacacgccgcagccgcccagtaccacaccaatttttttcatcgctttcgctcctccatgcaactcgctgaaaccagtcaaaaatgtcgattaactcgctatgcttcacatattttactgattcatgtaacaaattagttaagctttgctatcttaatgagcgagcaatccacttcttcggttgcgccacgtaacaacatcactcaaacaacactggctcaaccaccagttccctggtgttggcgcagtattcgcgcaccccggtctgtccggggtcattttttgctggctttcgccacccacgccttcagtaccgctacatcgttttgccactcggatttcatctcttcaacccattcagcgacattatcagaccaggcaggcagatccggagtctggatctgctggcccagctgctggatgtggcgcagtccgatagaaccggccgcccctttgatcttatgcccctcttcgacaatccctttttggtcgcgggcggtcagattagactccagaacggacatgtagcccggcatcatcttctcaaacaccgcgagaccatcgttgataagcttcggtcccaccagctcgatatattgctccagcatatcggtatccagcaccgcgtcggctttatgcagatcggccgccggcgcttcctgcgcttcctcatccggtgcatcccagaatttcttgatcatggccgtcagcgctggcaccgatagcggcttactcaacacatcgtccattccggcgtcgagatactctttcttattcttcagcacgttggcggtcagggcgaccagcggcggtagctcgtcagcggcaaagcgctgtttcagttcccgggaaatatccagtccggtcatgtccggtaactgaatatccaacagcacaaggtcatattcgcctggctcaaacatctccagcgcggctttcccggtcatcgccacatcaacgctgttacccagtttttccagcactgaacgggccacaataacgttgagctcaatgtcctcaaccagcagcacgttgagcgccggtaatggcatgtcgtcttccgccagcgtatcttccacttcttccgcaatggctggcgcatggacggtaagcgtaaaggtcgcccctttacccggctggctggtaacgctgatatcaccgcccatattacgcgccaggcgacgcgagacggcgagaccaatcccggttccggtggccggtttgccgccgtggctgtctttgacctggtaatacatggcgaaaattttgtcctgttccgcttcaggaataccaattccggagtcttccacttcgaagtgcaggatatcgccttcgtcatagcgcacgcggacgttcacccctccgccctgcggggtaaacttcacggcgttgctgataagattccacaggatctgccgcaggcgggtcccatccgtgattaccttatgcggcagcggcaggctcggctccagcacaaagcgcagccccttctgctgtgcctgcaggccggataggttttcaaggtcggcaaggaagctggtgaagtccaccggctggttatcgagctgcaccttgcggcgctccattttgtccatgtcgataatatcattgaagatattccccagcgtcaccgccgagacatggatagttttcaggtatttttcctgctcgctggtcagttcggtatccagcaaaattcggctcagcccgacgatcccgtttagcggggtacgcagctcatgactgatggtggaaataaaggtggttttatcccggctggcgcgctcaagagcgtcctgatagcgtttacgttcggtgatatcgcggccgaaacccatcaggccgcgacgcttaccgacgcgatcgtagtaggggaccttgcggatttcaaagcacgctttgcggccatcgggatagtccagccactgctcataggtcagcgatacattatggcggaacaccttctcgtcggtctccagtaccttttccgccgcctcttcgctatagacgtcctgcggtttgaggtggatcagctgtttttcgcttttgccggtcagcagctccatcgcccggttacagcctgaaaactccttatcctcattgcgatagaagaccaggtccggggaagcatcaaggaaagagcgcagaaaggaggattgctgttcgagctggatctgcgtctcttcgcgctctttcatctcaatcttcaactgctcgagggtggtctcgcgctcggcttccgctttttcacgttcgccaatctcctgattcaactgcgcgatgttatctttcagttggacgttcagctttagatcgcgctcacgcatctcctccagcttgtccaccagccgcgaaagacgctgacgggactcttcgagctgctccaccaccaccgagagaaagtagaccgcccaaggcgtgatcagcaggccaaagaagatagagcggataacgtcgatactttcaacctggccatgcagcaccatggtaaccgccatctgtaccacgatggccagcaccaccagcgcaagagccaacagcatcgaaaagcggaccagacccagcttcatcatcaggtcgacataatactgcgccagcatacgaatttgcttcataggggattccttcacgacaactccgcacaataatactcaattctgagcaatgcgctgtaagttgtgcaaaaaatgcgggcaggagtcgatacggcggccggccgctgaggcgaaccagccgcaaaagagggggatcaggagagggattaacgcttgcttaacgcctcccagagtcctttcaggtaggtcacgccgagggcgcggtcgaacaagccatagcccggccgtccggtctctccccagataaagcgaccatgatccgggcgaatatagccgtcgaatccgttgtcatacagcgcttgcatcactttgtacatatccagggagccgtactctgacggatgggcgcactcgtaaaagtctttatcctgcatcagctttatattgcggacgtgggcaaaatgaattcgcttacgccgcgtaaattcggccaggatggcgtacacgtcattatcaggatcttcggcaatcgagccggtgcagagcgtaatgccgttggcgggtgaatcgacagcccggcagatccagtccagatcgtcgcggtttttgaccacccgcggcaggccaaaaatggagtacggcgggtcgtccgggtggatcgccattttcaccccaacctcttcgcaaaccgggatcaccgcctgcagaaaataaaccaggttctcccgcagcttctgatcatccaccgcgctatatttggcaaacagggtctgcacctccgccagccgttccggctcccagcccggcaaggcgaagccgtttgaattctcaagcacctccttcaccacgtcctccagccgcttatcgatatctttcttctcaaacgccatcgtcagcgagccatccggcaggacgtagttcatatccgtcttcatccagtcgaaaaccggcatgaagttatagcagatgactttaacgccaaagcgggcaaggttgcggatggtctgctggtagttggcaatatagcggtcacgggtaggtaggccgattttgatgtcgtcatggatgttgacgctctctatcacctccattttcaggcctgcggcatgggcctgaccgaccagacgctcaattttatccaccggccatacttcgcccaccgcgacgtcgtagagcgcgccgaccaccccctcaacgccaggcacctggcgaatatgttctaatgaaaccttgtcttcctctggtccaaaccagcgcattgtcatctgcattgtcttcacctgctcaacttagtttaatttaccctactaccataccagtaatcatagatgattgagcgttggctgtcgtgatagcgatcacattcctgccgaccggctcgccagcggcgaatgcgtcggcgcattcataatttttttcaatttatttcaatagattaatcatgctatggctttttctgccgagctttctcaaatgtgatccaggcctgattatgatcttttgcatacttgtatggtaataaaagtagcgtaatttgttcagaaaaaagacaatggaaggaatcaaaatgagaagcgtcgtcgtcaaagagccaggccaactgaacattgaatcacgttcggttccagttccgggcgcccatgaagtacgggtgaaaattgcttttgctgggatctgtggttccgatgtacacatctatcacggccacaaccctttcgcgaaatatccccgcgtcatcggccatgaattctatggcatcatcgacgccgtcggcgagcaggtatctccggcacgcatcggcgagcgtgtcgcggtggaccccgttgtcagctgcggccattgttatccttgctcggtaggaaggccgaatgtctgtacgcagctccaggtcataggagttcaccgcgacgggggatttagcgactatgcctgcgtgccggcgaaaaatgcctggcgcatccccgaggctatcagcgaccgtcaggcaacgatggttgagccttttaccatcgcggcaaatattaccgcccagctgcagcccacggcgcaagatattgccctggtttacggcgctggcccgatggggctgacaatcattcaggcgctaaagggggtatatggcgttaagcaggtgatcgtcgtggatcgcattgccgaacgtctgcagatggcccgggaaaacggcgccgatctgacgctcgataacactgaccagccgctcacggaacagctggcgcagcggcagcttgcccccacgctggtcattgatgccgcctgccacccggcgatcctgcaggaagccattctcctcgcctcccccgccgcccgcatcggtatactcggtttctccggcgaggcctcaaccctcactcagcaaagcatcaccagtaaagaaatttctattttctcctcccggctgaacagcgggcgttttccgctggtcatcgactggatggagaaaggccttattcgtccggaggcgttaatcacccattgtatgccgctggagcaggtgaaagaggccatggagatttttgctaacgaccgtaagacctgctgcaaagtgctgctgcagttgggttaaaccggcatcgtatagaataacggccgacggatatctgcgtatccgccgcgcctgatataaataatataatgagcatggtgttatcatgggaaaaaatatccgctggattatcgtcctgttattatttttagtatatatgataaattatcttgaccgggtggcattatccattacggtcccgatgattgaaaaggaccttgcacttaacgctgaacaattcggcattattttcggcagctttttcttcggctacgcggtatttaattttattggcggtttggccgtggataagtttggcgcaacgctggtaatgggcctggcggtcggtctgtggtcgctgttttgcggcttaaccgcggtagccaccggcttttattccatgctggtgctgcgggtgcttttcgggatggcggaaggcccgatctgcgcatcggcgaacaagatgatcaacggctggtttcctaaaaagcaagcggctaccgccgtcggctttctcagcgcaggctctccgctgggcggcgcggtcgccggccccatcgtcggttacctggccctggcattcggctggcgcccggcttttatgattattttcgctatcggtattgtatggatgatagcgtggtttttcattgccgctaattcgcccgaaaagcataaaaaagtcagccaggaagaacttaagctgattaataaaatgaaagaagaagaagtcgcgctggaaacaatagaaaatcaaacagctcactcgctgggttattatttgaaacagccaattattctggtaacggcctttgccttcttctgctacaactatattctgtttttctttctcagctggttcccgtcctatctggtacaacagcaccatctggatattaaacagatgagccttaccactatgatcccatggatagtcggctttgtcggtctggcgcttgggggctatatttccgataaaatttttaaactcaccgggcgcctgctgctgtcgcgcaaaattgtgctggtggtatgcctgctgatggccgctatctgcgtgggactggcgggtaccgtcagcagcgtcgtgcctgccgttctgctgatgtcggtctccatctttttcctctatgtaaccggggcgatctactgggcgattatccaggacgtggtgcataaatcccgcgttggcggcgccagcggctttatccatcttatcggcagcgtctccggcatcgtggggccgattgttaccggctatatcgtgcagtctactggtaaatttgacagcgctttcgtactcgccggcactatcgccgcgcttggcgccctgctggtgctgttcgtgatcaaaactccgcgtgtgacgatgaaagccagccaggcataaatggcaggagcgcgatgtccggcattgttccggacatcacgctcgtacttctcactcagcctggggaacaacccagctacggcccagcgccgagccctgagcgccctgctgattcagataacgatccagttcaaccatgccggtccagcgattttcacaccacagcggcgccaacagcgtgggccgacgggcgctggcggaaatacggtggtagatcacctccggcggcgtatggcggatcatctctccagcggtgacggtatacgcctccagctcaatgccatcgagacgcccggcctgccacgctttggccataatgctgcctttcacaatatgcagtggatgcaatttgatcccatccacgccggtcgccactacctgctccagcgtctgcagacaatgcccctggctctctccgggcagaccgacgatcagatgcgcacagactttcagcccccgctctcgcgccaggcgcgcggtacgctgataacaggcgaaatcgtgtccacggttaatgcgatgcagggtcttatcatgagcagtttgcagccccagctccagccatacctcatacccttgctgatggtattcactcagcaggtcaaggaccgcctgcggaacgcagtccgggcgggtgccgacgcacaggccaacgatatttgcggcactgacggcctgacgatacattgaacggagcacctgcacttcagcgaaggtgctggtgtaggcctgaaaataggccagatagcgcttcgcccggttgacgagctgcgcctgatgagcgagctgttcggcgatagagcgatgctgctgcgcctcatcggcaaacgatgccacgttacagaaagtgcaaccgccgcggcccagcgtgccgtcgcggtttgggcagctaaaaccgccgtgcagcgttagcttatggaccttttcgccatagcgacgcataagatccccaccaaacatattgactaatttctgtaactgcataatctgatagaccgccctcaacaaagggggccaagcctgccacttttcgtcaccgacggcgatgacctggatcaatcgtcagcgcggcgatcaaccctattgcataaacaatcaagattactgcaatttcattcaaccaccaggtgatgagttttccttatattttatcttcgcattgccctaatctgctttctggtaaaaaacggtattaatgtccagtagttaaaaatattgcagtcaaatatgctaataatgaaatgtatttcagcgcatattggtaatgcaaagccgcgtgcacagtgagacagatcacactagccgcaccaccagcaggcgtattcaaagcataaaaattgccattattttctttaataacaattagttaacttgtgtatagcacatttttgtattaataagattgccatttgacgtaagtgtggattcccgataagttgggaatccgctggaagctttctggatgagcactctgctcatcatatttatgcagtaattgagattccctcttaacagcaagtcctcaaacttgtgtaccgatgcgaaaaggatttaaagagggcgaatgcgaggtgtaaaccccgtcgccatgctctttctgtgcctgtgcgcaatcggtatcggagggtgtccgtagagcctggggaggttcactgatatgttgtacgacaaatcccttgagagggataactgtggtttcggcctgatcgcccacatagaaggcgaacctagccacaaggtagtgcgaaccgcaatacacgcactggcccgcatgcagcaccgtggcgcaatccttgccgatggtaaaaccggcgacggttgcggtctgctgctgcaaaaacccgatcgtttcttccgcatcgttgccgaagagcgcggctggcgtttagccaaaaactacgccgttgggatgctgttcctgaataaagatcctgagctggctaaagcggcgcgccgcatcgttgaagaagaacttcagcttgagaccctgtcgattgtcggctggcgcgatgtgccgaccaacgaaggcgtgctcggtgaaatcgccctctcctcgctgccccgtattgagcaaatctttgtcaacgccccggctggctggcgcccgcgcgatatggagcgccgtctgtttattgcgcgtcgtcgcattgaaaaacgcctgcaggaagacaaggatttctacgtttgtagcttgtccaatctggtcaacatctataaaggtctgtgtatgccggcggatttgccgcgcttctacctggacctcgcggacctgcgcctggagtcggctatctgcctgttccaccagcgcttctccaccaacaccgtaccacgctggccgttggcgcagccgttccgctacctggcgcacaacggtgaaattaacaccattaccggcaaccgccagtgggcccgcgcccgtacctataagttccagaccccgctgatccctgacctgcacgacgccgcgccgttcgttaacgaaaccggctccgactccagttctatggacaacatgctggagctgctgctggccggcgggatggacatcgtgcgcgccatgcgtctgctggtgccgccagcctggcagaacaacccggatatggatccggagctgcgttcgttcttcgactttaactccatgcatatggagccgtgggacggcccggcgggcatcgtcatgtcagatggccgctacgcggcctgtaacctcgaccgtaacggtctgcgcccggcgcgctacgtcattaccaaagataagctcatcacctgcgcctccgaagtcggcatctgggattaccagcctgacgaagtggtcgagaaaggccgcgtgggcccgggcgagctgatggttatcgatacccgtgccggacgcattctgcactcagcggaaaccgatgacgatctgaagagccgccatccgtataaagagtggatggagaaaaacgttcgtcgcctggtgccgttcgaagatctgccggacgaagaggttggcagccgccagctggatgacgacacgctcgccagctaccagaaacagtttaactacagcgcggaagagctggactccgtcctgcgcgtgctcggcgaaaatggccaggaagcagtcggttcgatgggcgatgacacgcctttcgccgtgctctccagccagccgcgcattatctacgattacttccgtcagcagttcgcccaggtgactaacccgccgatcgacccgctgcgcgaagcgcacgtcatgtcgctggctaccagcatcggtcgcgaaatgaacgtcttctgcgaagcggaaggccaggcgcatcgtctgagcttcaaatcgccgatcctgctgtactccgattttaaacagctgacgacgatggaagaagagcactatcgcgccgacgtcctcgatatcacgttcaacccggcagaggcctccctcagcgagacggtgaaagcgctgtgcgataaagcggagcaaatggtgcgcgacggcaccgtgctgctggtgctctctgaccgcaacatcgccaaagaccgtctgccggtaccggcgccgatggccgttggcgcgatccagacccgtctggtcgataaaagcctgcgctgcgatgccaacatcatcgttgaaaccgccagcgcccgcgatccgcaccacttcgccgtgctgctcggctttggggcgacggctatctatccatacctcgcctacgaaacgctggcgaagctggtcgacagcaaagccatcgataaaccgtaccgtgcggtgatgctgaactatcgcaacggtatcaataaaggtctgtataagatcatgtccaagatggggatctcgaccatcgcctcctaccgctgctcgaagctgttcgaagcggtcggtctgcatcgcgatgtctccgagctctgcttccagggcgtggtcagccgcatcggcggcgccagcttcgacgacttccagcaggatctgctgaatctgtcgaaacgcgcctggctggcgcgtaagccactggcccagggcggtttgctgaaatatgtgcacggcggcgaatatcatgcctacaacccggacgtggtgcgcaccctgcagcaggccgtgcagagcggcgaatacagcgattatcaacaatacgcgaaactggttaacgaacgtccagcggccacgctgcgcgacctgctggcgctcaacccaggcgaagacgccatcagcatcgacgaagtagagccggcgaaggagctgtttaaacgcttcgataccgcggcgatgtcgatcggcgccctgagcccggaagcgcacgagtcgctggcggaagcgatgaacagcatcggcggcttctccaactccggtgaaggcggtgaagacccggcgcgctacggcactaataaagtgtcgcgcatcaagcaggtcgcgtccggccgcttcggcgtcacgccagcctacctggtcaatgccgacgtcatccagatcaaagtcgcccagggggcgaaaccgggtgaaggtggccagctgccgggtgataaagtcaccccgtacatcgccaaactgcgctattcggtaccgggcgtcacgctgatttccccgccgccgcaccacgatatctattctatcgaggatctggcgcagctgattttcgacctcaagcaggtcaatccgaaagcgatgatttcggtcaaactggtttctgagccgggcgttggcaccatcgccaccggcgtggccaaagcctatgccgacctgatcaccatcgccggctacgacggcggcaccggggcgagcccgctctcttcggtgaaatatgccggctgtccgtgggagctcggcctggtggaaacccagcaggcgctggtcgctaacggtctacgtcataagatccgtctgcaggtggatggcggcctgaaaaccggtctcgatatcatcaaagcggcgatcctcggcgcggagagcttcggtttcggtaccggcccgatggtcgcgctgggctgtaaatacctgcgtatttgccacctgaacaactgcgctaccggcgtggcgacccaggatgacaaactgcgtaagaatcactatcacggtctgccgttcaaagtgaccaactactttgaatttatcgcccgtgagacccgcgagctgatggcccagctgggcgtcaagcgtctggtggatctgattggccgcaccgatctgctcaaagagctggatgggttcaccgccaagcagcagaaactggatctgggtaaactgctggagaccgcagagccgcatccgggcaaagcgctgtactgcaccgagaacaacccaccgttcgataacggcgtgctcaacgcccagctgctgcagcaggcgaaaccgtacgtggatgaaaagcagagcaagacgttctggtttgatatccgtaacaccgaccgctccgtgggggcctcgctgtccgggtatatcgcccagacccatggcgaccagggactggcgggcgacccgatcgtcgctcactttagcggcaccgcgggccagagcttcggcgtgtggaacgccggcggcgtggaactgcatctgactggcgacgccaacgactacgtcgggaaaggcatggcgggcggtctgctggccattcgtccgccggtgggctctgcgttccgcagccatgaagccagtattatcggcaacacctgcctgtacggcgcgaccggtggtcgtctgtacgccgcaggccgcgcgggcgagcgtttcgccgtgcgtaactccggcgccatcaccgtggtggaaggcatcggcgacaacggctgcgaatatatgaccggcggcatcgtctgcgtgctcggaaaaaccggcgtcaactttggcgcagggatgaccggcggctttgcctatgtcctggatgaagatggcgacttccgcaaacgcgtgaacccggagctggtggaagtgctggacgttgattctctggccatccatgaagagcacctgcgcggtttaatcaccgagcacgtacagcttaccggttcgcaacgcggcgaagagatcctcgccaactggccggccttctccgcgaagtttgcgctggttaaaccaaagtccagcgatgttaaagcactgttgggtcaccgtagtcgttccgcagctgagctgcgggtgcaggcgcagtaaggggttaagatgagtcagaacgtttatcaatttatcgacctgcagcgcgttgatccgccaaagaaaccgctgaagatccgtaaaattgagtttgtggaaatttacgagccgttttcagaaggccaggccaaggcgcaggcggatcgctgcctctcctgtggcaacccgtactgcgaatggaagtgcccggtgcataactacatcccgaactggctgaagctggccaacgaggggcgtatttttgaagcggccgagctgtcgcatcaaaccaacactctgccggaagtctgcgggcgcgtctgcccgcaggaccgcctgtgtgaaggctcctgtacgctgaacgatgagttcggcgcggtgaccatcggcaacatcgaacgctatatcaacgataaggcattcgagatgggctggcgtccggatctctccgacgtgaagccgaccggtaaaaccgtcgcgatcatcggcgctggcccggcgggcctcgcctgcgccgacgtgctgacccgtaacggcgtcaaggcggtggtatttgaccgccatccggaaatcggcggcctgctgaccttcggtatcccagcgttcaagctggaaaaagaggtgatgacccgccgccgggagatcttcaccggcatgggcattgagttcaaactcaataccgaagtgggccgcgacgtgcagctcgacgacctgctgaaggagtacgatgcggtgttcctcggcgtcgggacctatcagtcgatgcgcggtggactggacaacgaagacgccccgggtgtttacgacgcgctgccgttccttatcgctaacactaagcagatcatgggctttggtgaaaccgccgatgagccctatgtcagcatggaaggcaaacgcgtggtggtgctcggcggtggcgacaccgcgatggactgcgtacgcacctccgtccgtcagaatgcggcgcacgtgatctgcgcctatcgccgtgacgaagagaacatgcccggctcaaaacgcgaagtgaaaaacgcgcgcgaagaaggcgttgagttccagtttaacgtccagccgctgggcgtggaagtaaatgccaacggtaaggtttgcggcgtgaagatggcgcgcaccgaaatgggccagccggatgcgaagggccgccgccgcgcggagctcgtccccggctctgagcacgtggtgccggctgacgccgtagtcatggcgtttggcttccgtccgcacagcatggagtggctggcgaagcacagcgtcgagctggactcccagggccgtattatcgccccggaaggcagcgaaaacgccttccagaccagcaacccgaaaatcttcgccggtggcgatatcgttcgcggttccgatctggtggtcaccgcgattgccgaaggccgtaaagcggcggacgggatcctcaactaccttgaagtctgattaggtccggagcctcacgcataaaagcccgatggttaacgtcatcgggcttttttattgctcattcgccgggtaaaccgccgctttcagcgccgtattataccagccgcagatatgctccaggcgggtaatcgccgagccgacggtcaccgcccacgcgccgcagcgcatcgcctccgccgcctgggcaggcgtgttatagcgcccttcggcaatcactctgcagcccgccacgctcaggcattgcaccagcgccagatccggctcatccggcgtctcttctgcggtatagccggagagagtcgtcccgacaatctcagcccccaactgccagcactcgagagcatcgtcgagagatgagcaatcggccatcgccacttttcccagccgatgaatttctgctaatagcgccgacactgacgccggacgctgacgctgggtgccgtcaatagcaataatatccgctccgccctgcgccagcgcgtcgatatcttccagccacggcgtaatacgcaccgggctatcaggcaaatcgcgtttgatcaacccaataacgggcaccgtcactaacggacgaacggcctgcaggttggcctggccttcgatgcgcagcgctaccgctcccgcctgctcagccgccagcgccattgccgcgacgatagcgggattatccagcggactgcccggcaccggctggcaggagacaattaatccgccatgatgacggatacgctggtccagttgtgcgagtaaagacatgtctgctccctaaaaactacctgtggcgatgacgataccagccatgggacgcctcgtttgtggcagagttaacaaagcggacagacaaaaaaacaggccccgcagggcctgtcagagaagggattcacttcaccacgcgcagcgccgggcgaccaccgcgcggcggcggcgtgtcgtcaggatcgtcgtcgtgattatccggcttatcgccatcgatcaccgacatcaccgtttcgctttcactctccggcgcgacgtcatcatcgttgaggctgctgacgtcttcgtcataggccgcttccggttcgaacatcgtaccagcgccgttctcacgggcgtagatggcgagtaccgcagccagcgggacagacacgttgcgtggtaccccgccaaagcgcgcgttgaagcgcacttcgtcgttcgccagctcgagattgcctaccgcacgcggggcaatattgagaacgatttgcccatcgcgcgcgtactccatcggcacgagcacgcccggcagcgtcacatccaccaccaggtgcggcgtcagctggttatccagcagccagtcataaaacgcccgtaacagatacgggcgacgcggcgtcagctgtgatacatccattatttagccccgaccgaggcgcatttcacgctcggcttcagttaaagaagcgaggaaggaatcacgctcaaatacgcgagtcatatagcctttgagctctttcgcaccagcgccaaccagctccacaccaagaaccggcagacgccacagcagcggcgccaggtagcagtccaccaggctgaactcatcgctcaggaagtaaggtttctgggtgaagaccggcgcgatggccagcaattcttcacgcagctgcttacgcgcagcatcagcttgcgctgcggtaccgctctggatggtgttcatcagcgaataccagtccttctcgatacgttgcatatacaggcggctttcaccacgcgccaccggataaaccggcattaacggcgggtgcgggaaacgctcatccagatactccataatgatgcgggattcccacagagtgagctcacgatccaccagcgtcggtacgctttgattcgggttgaggtcaatcagatcctgaggcgggttatccttctccacgtgctctatctcaaaactgacacccttctcggccagcacaatgcggacctgatggctatagatgtcagtaggaccagaaaacagcgtcattaccgaacgtttgttggcagcgacagccatgaaaacctccaggtatattcagaattttgtactgctgccggccactcatgaccagccagatgtaaaaaccccattagcgcgatgtcaccttcgttcacgaataaaacaaaaaatgaacaatcaccagcatttgggcagaaaattggatgatagtttaccagattttgaagacgttgtggtgaggggattctggaaatgctgaaaaagtggcgagaaccggcgctatgcttgtggataacagccgttttatccataaaaaaacccgccgaagcgggttttttcgcaaattgttctgcgtgagcagaaaacaattaacgtttggagaactgcggacgacgacgtgctttacgcagaccgactttcttacgttcaacctgacgagcgtcacgagtaacgaagccagctttacgcagttcggaacgcagggactcgtcgtactccatcagagcgcgggtgataccgtgacggatcgcaccagcctgaccagagataccaccacctttaacagtgatgtacagatccagtttctcaaccatgtcgaccagttccagcggctgacgaactaccatgcgggcagtttcacgaccgaagtactgttccagagaacgctggttgataacgattttaccgttgcccggtttgatgaaaacgcgagctgcggaacttttgcggcgaccagtgccgtagtattgattttcagccattgcctataatcccgattagatgtcaagaacttgcggttgctgtgccgcgtggttgtgctcgttacccgcgtaaactttcagtttacggtacatagcacgacccagcgggccttttggcagcatgcctttaaccgcgatttcaatcacacgctcaggacggcgggcaatcatctcttcaaaggtcgcttctttgataccaccgatgtggccggtgtggtggtagtacattttgtcttcgcgcttgttgccggtaacagcaactttttctgcgttcagaacgatgatgtaatcaccggtatcaacgtgcggagtgtattccgctttgtgcttaccgcgcaggcgacgagccagttcagtagccagacggcccagagttttaccggtcgcgtcaacaacataccagtcgcgttttacggtttctggtttagctgtaaaagttttcattaaaagcttacccaaataataagttacacgttggtgaacacccaaacgtttagtcagttgaggttcacacgacattgtccagcaaacctaccccttcgaatagcctatgccggcgcatagaaagtttcgggaaaaaaaccttctcgtaacgtggggtcgcaagattatagagaagtcggggtcaaagatcgacccctttatgagatttttcaggccgcgcccggggcggccttacggccctgaatccgcctgaaaaagtcacctgtcagggcatatgcggacgtttgaggtactcttcgctctgcatctcctgcagacgcgagagacagcgctggaactcaaacttcagccgctcgccctggtaaatgtcgtacagcggtactgccgcgctgaccaccagctttacatggcgctcgtagaactcatccaccagagcgataaagcggcgggcctcgctctccagctgcgcggtcatcaccggcacgtcgaacagcatcaccgtatggaacagtcgggagagcgcgatatagtcatgctggctgcgcgcatccacgcatagcgtggcgaatgacgccgccagcgtctggttttctacgccgagggtaggcagctcgcgatggttaatctccagcgtcggcccggcagcgcgcggcgcgcccgccagcgcgagccacaatttatccatctgttcgcgggtgtcgttattcagcggcgacagccacaggtgcgcctgcgtcagggtacgcagtcgataatcgatgccggcatcgacgttcataatatcgcaatgctgcttgatggcatcgatcgccggcagaaaacgggcccgctgcaggccattacgatagagttcatccggcggaatattggaggtcgccaccagggtgatgccgcgggcgaacagggctttcatcagcccgcccaacagcatggcgtcggtaatatcggagacaaaaaactcgtcgaaacagagcacgtcggtttccgctttaaagcggtcggcgacgatctccagcgggtcgctatgtccctgcagggtggtcagctcttcgtgtacgcgcagcatgaaacgatggaaatgcaggcgctgtttacgctcgcccggcaggctctggtaaaacaggtccatcagccaggttttgcctcgccccacgccgccccacatatacaggccgcggacaggtgccgtcccggcagccggctcgcgcttacccagcagtttgccgaatttcgcgcgcaaaccgccgcctgacgcgaccggcgcgggctgcgtctgcagttcctggtaaatggtatcaaggcggctcaccgcttcttgctggacgtcgtcgggttgatggctgccctctttcagggctaaaaggtaacgcgatgttggagacaggctttgcatgatctaattgttattccttgaaaaccgtaatgccgaagctcacgattgacgaaaaaaaggccgttctacactacgcgatgatacgccaggattccacttctgtggaattagcggttatagtggcactatcgggcgcaggcggagagcctaagagccaccctacggaaccacaatacaacgggagatgttcatgacctgggaatacgcgctaattgggttagtcgtcggtatcatcattggtgccgtcgccatgcgtttcggcaaccgcaaactgcgccaacagcaggcgctgcagtacgaactggaaaagaataaagccgagcttgaagagtaccgtgaagagctggtgagccactttgcgcgtagcgccgaactgctggataacatggcgcacgactatcgtcagctatatcagcatatggcgaaaagctctaacaacctgctgccggactcgatggcagacgccaacccgttccgcaaccgtctggaagagtctgaagccagtaacgatcaggcgccggtccagatgccgcgcgactactccgagggcgcatccggtttactgcgcggaggcgcaaaacgcgattaagcctcgctgcgattaaaatattctccgggcgcgcccgtcgcgcccgctccttcccccacttcccggctacaatttaaaccagtccccacgttgttacctgtgcaaaaattcaataacatcaggttattcaggacatttttccatacacctcaggttacgagagccagcatctaatgaagaaacagactttgctgttgagtgcgttagcgttaagcattgggttatcgttgtcggtcctgcctccggcagcggcatccttaccgactcaggtgcccggccagggcgcgttaccaagcctggcgccgatgctggaaaaggttctgccggcggtggttagcgtacaggtggaaggcactgcctcgccgacgctcaatatgccggaagagctgaaaaaatattttggcgataacgccccgcaggagcaggcgcagccgtttgaagggctcggctccggcgttatcatcgacgcggcgaaaggctatgtgctgaccaataaccacgtcatcaatcaggcgcagaagatcagcgtccagctgaacgatggccgtgagttcgatgccaaactggtcgggagcgatgaacagagcgatatcgctctgctgcagctgattaagccagaccacctgacgcaaatcgccattgctgactctgataaacttcgcgtcggcgacttcgccgtcgccgtcggcaacccgttcggccttggccagaccgccacatccggcattatctctgcccttggccgcagcggcttgaaccttgaagggctggagaatttcattcagaccgacgcctcgattaaccgcggcaactccggcggcgcgctgctgaacctcaacggcgagcttatcgggatcaacaccgcgatcctcgcgccgggcggcggcagcatcggcatcggctttgccattccaagcaatatggcgaaaaccctcgccgaccagcttattcagtttggcgaaatcaagcgcggcctgttgggcattaaaggcatggaaatgagcgccgacatcgccaaagcgatgaatctcaacgttcagcgcggcgccttcgtcagtgaagtcctgccaaactccggctccgccaaagcggggattaaatccggggacgtcatcgtgagtctgaacggcaaaccgctgaacagtttcgccgaactgcgttcgcggatcgccaccaccgagccgggtaccaaggtcaaactgggcctgctgcgcgatggaaagccggtcgatgtcgaagtgaccctggataagagcacctcctcaaccgccagcgcggaactgattatcccggcgctgcagggggcctcgttcagcgacggccagatgaaagatggcaccaaaggagtggtgatcgataatgtggataaaggcagcgccgccgcccaggtcggtctgcataaggatgacattatcattggccttaaccggcagcgtattcactcaattgccgaactgcgcaaagcgctcgaaggcaaaccgccggtcatcgccctgaacgtgatccgcggcaacgaaagcatctatctgctgctgcgctgattgtctctccgggcatcgccgccatgtgcgatgtccggacaactcatgctatgctgcgcctgaccattcattaacgatatctgcatcatgcctggaaagttattacgttcagtactcatcggtttgcttgtcgggggtctgctgctggccctgatgccctcgctgcgccagtggcagttggcgccgactacccagaacgatacggcagacgactccccggcgagctataacgccgcggtgcgccgcgcggcgcccgccgtggtgaacgtctataaccgcgcccttaacagcaccagccataatcagctgacgcttggctcaggggtgattatggatcagcgcggctatatcctgaccaacaagcatgttatcaacgatgccgatcagattatcgtcgccctgcaggacggccgcgtcttcgaagcgctgctggtaggatccgattccctcaccgatctcgccgtgctcaaaatcaatgctaccggcgggctgccggtgatcccgatcaatccgaaacgcacgccgcacatcggcgacgtggtgctggcgattggcaacccttataacctggggcagaccatcacccaggggattatcagcgccacagggcgcattggcctcaatccgaccggccgccagaacttcctgcagactgacgcctcgatcaaccacggtaactccggcggggcgctggtgaactccctcggcgagctgatggggattaacaccctctcctttgacaagagcaatgacggcgaaacgccggaaggcattggctttgcgatcccgttccagttagcgaccaaaattatggataaactgatccgcgatggccgggtgatccgcggctatatcggcattagcggccgggagatcgccccgctgcacgcgcagggcggagggatcgatcagattcaggggatcgtcgttaacgatgtggctccggacggtccagcggcgcaagccgggatccgcgccaacgacgtaatcatctccgtgaatgacaaacccgccgtctcggcgctggagacgatggatcaggtggccgagatccgcccgggatcggaaattccggtggtcatcatgcgtgatgataagaaaatcacgctccatatcgccgtccaggaatacccggccaccaactaaacggctccccgtttggggagccacgttaatcgctaaataccggaccggccgggaatctgaccagaaacccggtttccatgaatgctggacaataaaaagccggaacagcggttccggctcttctgttagggcgagattacttgttgacgaagtcttcgccgagcgcgatatctttcttcagggtgtccagcatgccctccagcgcctgctgttcaaaggcgctgagtttgccgatagactgtcgctcttccacgccgtttttccccagcagcagcggctgggagaagaaacgcgcatagtggccgtcgccttccacgtaggcgcactccaccacgcctttttccccctgcatggcgcgaaccagagagagaccaaaacgggcagccgcctggcccatcgacaaggtcgccgacccgccgcccgctttcgcttccacgacttcggtaccggcgttctgaatacgtttagtcaggtcggcaatttcctgatcgctaaagctgacgccggggatctgcgacagtaaaggcagaatggtgaccccggagtgaccaccaatgaccgggacttccacctcggttgccgatttacctttcagctccgccacaaaggtattggaacggatgatgtccagcgtggtaacgccgaacagtttgtttttatcgtacacgccggcttttttcagtacttcggcggcgatagccacggtggtattcaccgggttggtgataatgccgatgcaggcctgcgggcaggttttggcaatctgctgcacgaggttcttcacgatacccgcattcacattaaacaggtcggaacgatccatgccgggcttacgcgccacgcccgcggagatcagcactacatccgcgccttccagcgccggagtagcgtcttcaccggaaaatcctttaatttttacatctgtggggatatgacttagatctaccgccacgcccggcgtaaccggagcgatgtcgtacaacgagagctctgaacctgaaggcagttgggtcttaagtagtagggcaagcgcctggccgataccaccggcagcgccaaggactgcaactttcatcctaaactccttattatggttaatttagtctttcgttattccgtcgcctggaccttaattcacaagatgaacaattacaatgattatggctgaagaatgcattattgtgcgtagcaatagaacagcggcgcactttatgcttcctgactgaccatccagcaaagcgaagaaccggatcgactattggttacaatacacccagccagttgcgcaaaacaacaccaactcaataacatttcatttacttttacatggctttaagcgttgtgatgagaacatgttccttatacggtttttttgctaaaatatgcccccttcataacattattgacctatcctttcgcggattatttgcataaaaattcatggttatgcataatgatgttgattttaccaccataatctgggtgacttatgcgaagttcggcaaaacaagaagaactggttaaagcgtttaaggcgctgcttaaagaagagaaattcagctcgcagggagagatcgtccaggcgctgcaggaagagggcttcgagaatatcaaccaatcgaaggtttcccgcatgctcaccaaatttggcgcggtgcgtacccgtaacgccaaaatggaaatggtctattgcttgcctgccgagcttggggtaccgaccacctccagcccgctgaagaatttggtgctggatatcgactataacgatgccgtagtggtgattcataccagccccggcgccgcgcagctgatcgcccgtcttctcgactcgctgggcaaagcggaaggcattcttggcagtatcgccggggatgacaccatctttaccacgcctgcacgcggttttacggtgaaagatctgcacgacgccattctggttctgtttgagcaggaactctgagtaattcccctctggctaccgtcagagggcgactcctctttcttttgcctctccccccttctggcacaacaactatttaacacttagtgtcatttacgccgtctatacgttcttttactaacgcgaaaatcgtaaaacgcacaaaagatcaaattcgtatacctttatgaatttattagaaataaatcttatcgctgtcgctaacgtgtcatttttaattcttatccgttataaaaagcgcaatctattgtaactattaacgcacaaaacaattagcatggtattaatatttttagtgattagtgtatacttggttttgtgatgagggtcacgaaacaaagacccccaacaaaaagattcgacgaggtgaacatcatgaaaatcaaaaccactgtagctgctatcagcatcctgtccgtcgtgtcgtttggcgctttcgccgctgatattatcaacagcgagcaggcccagggccgcgaggccatcggcacggtttccgtcggcgcggtagcatcttccccgatggatatgcatgaaatgctgaacaaaaaagcgcaggaagaaggggcttcttcttaccgcattatcgaagcccgcactggcgaccactggcatgccactgctgagctgtataaataagttttagacgtcaacgattaacctgacaaaaattctctaccgcggcccggcgacatacatcgccccgccgcggcaaaacaaagactggagtaaagattatgaaacgcgcaatgatcatcgcatcccttggcctggcttcccttctctctttcggtgccagcgcggctgtccagcaagtgaacgcagagcaagcccaaaatctgcaatccatgggcaccatctccgtatcccaggtaggtagtgcgccaatggacatgcgtcaggaactggcggctaaagccgagaaagaaggcgccagcagctaccgtattattgaagcacgtaccggcgatagctggcacgccaccgctgagctgtacaaataaaccctcgtcgtcttatttcgacgacttgcccccgcctgccgggggcttttttatgcttgtcgggcattaaaacgcaactccccctccagctcttcctctgcttcatcaaacaataaaatcaatgcgccaaagcgccggcgctgcttgtcatttaaatggatgaattcaatatccagcggcagcggtagcaggccaccggtcactgcgtcccatagcgaatccaggttgttgaccttatcctgagccagctcgaaggttcgggaaaactcccggtagaaatcctgttgttcggcgatttcgtcaaaatcaaacgtataggtggtcatgacagcccctcccgcttctctttctgtcgccgttaagtatagcgataaaaaaaccgacgcctgggcgtcggtttatgggttagctgctggtcagcacatgctggtacttatgcaacatctcaaccagtcgccgtaccggctcggtgacctgcggcgaggcctcccagacccgcagcttctcctgatagacatcaagctccgccagcaactgggtaaaatagcgccgacgcttatcatcgctgccggcggagatcacatggtccgcggtacgtcgcagctgacgatggaaggcggagagatcgtcgttcaccggcacgggcgcatcgcgcaagcgctgatgggcgatgattaacgtcaacgccagacggaaacgggcgacgtcacccgggaatttattgagtaataaaaacagctgctgatagagcgcgggcagatgattctctttgcgacgcgccgagttggtggtcagcgaagagaccgccgcggagacaaactggttcagcagcacccgaccggttctggcccgggagttatccctgacaatgagaataaccatcagagcgaggaaacagccgacgatctgccccagcgcgctatcgaggaactggctgaactggaactgcatcgggttatccagcaccagaatgttgatggtgctcgccagcgcccccagcgatccgagacgccttttttgtacttcgatcccgataaagaacgccatcgccgccaggctgatgcaaagcaacagcatgctctgctgcgtcgccggcatgatcaccaggaagtacaaggtgcccaacggtaacgccgccagggtgccatagaggaagtctatcgccaccatacgcgggtttggcaggcgcatcgccagcgcggtaaccacggcgatcattaccatcgcgccgctgcctgaggtccagcccgtccacagccagaatagcgttccgagaatacaggagacagaggtgcgccagaagttcaccatcgcgtgatgacgttcggcggactccactttaaccaccgtttcgccgcgcaacacgccatcctcgatacggctgattttagtattccccaccacgccgcgcttaagcagcaggtaacgcgtggcggcgcccacccagctataaatcgtgaccggggtattatgctcgcctttccaggtcaggaagcggcgcatgcgcttcagctgctggtgaacatcctgcaccgtctcaaccggctcggcgaacagctcgcgatagtcgtccgtgaccatttccgggcgtgagttctgaatcagataggtttcgcaagcctgggtgataagggttagcgaaagggtgttgatcgccttcaggcgctgattggcctttgcccagcgtgaggattccataatcaggttactacgcataccttccagcgccgtagtgcggcgtaccagcgctccccaggcttgatccacttcctctttttcaccgtgcgcgacgcataactgcatcagcttatactgtgcaattagcagattatcgagctcgaggtcgatctcttttttaatcgaacgcggcgaaaacaggagatcggcgacgatggcgctgacaataccgatgacaatttcgctgcagcgttcgacagcaaactgcggcgccagcatcggattggtatggatggtaataatgataatcagcgcggtgtacccggccagcccccaggcataggagttttcgaccttgaccagcgacgaaacccaggtacaaaacccggcccacagacagcagaccagcatcatcagcagaggcgcgcggatcatcaggatgatgataaccagcgccgcaatacagccaataaaggtcccggcaatacgcaacataccgcgatagcggatcgcgccggagtacggttcgccgccagcagcaaaggccggcccggcggcgacgatcgctgccgtcagtaccgcccagcgcggcgtttcgagctgaaaatggaaaccgacaaacagcgccagcaccaccgcgcatgcaagcttaatggcaaagcggagatgccggggagcaatggtatatgtccccatagcgattaaccaaattcgcgcaggcgcatagccagtttctggaagaagttggcctggctggtatcacgatcttcttgaccggtgatcactaccgtcgccgtggtgcccgatggccacagattcccctgctggtgatcgaggcgaatacgcaccggcacacgctgcgccagacgcacccactcaaggttggagtcgaccgaggccatccctttcgagtcgctgctgctgctggcgttggtcacccccgcagcgatactgtccaccgtccctttaatggttttgctgctgcccagcggggtaatctccgcacgatagcctggacggacgccctccagtttggtctcttccagataggccatgacgtaaaacgtattctctttcaccagcgccaccgccgtggagccacgggtgataaattccccagtgtagacgttaaggttagtcacccagccatccgcaggggcgcgaatgaccgtccgctccagatctagcctggccaggtcgcgactagccaccgctttcgccagctgatgttcaacggtttgcagtacgttgttcgcctgatcaatctcttcccgcgacatcgcctgtacgccaagcttattacgccgaccggcttcgacgcgtttttcctgagctaacgtctgataataggcgacatcagcttccgcctgcgccagcgctttttggtaacgaggttggtcaataacgaacaatacctggtctttcttaaccagttggttatccttgacgtttacctgagaaatcagcccggagacgtcgggggcaatcgccacaatgtcggcgctaaagcgcgcatcacgcgtccacggcgaggcggtgtaataaacccaggcgcggaaaatcgccacgaaggccagaatgaccagtatcacggtaatggcagtacggaggatatttcttgttagtgttttcacatcaacctcaaacgaacaagcgcgatatcaaataaaaaaggcagcaatagagcgccgtattaaacagtgctgggtgccagacaaaatcgtaaatgccggtcggaaccagcagtcggtgcaccagccaaaagatagccagcgacaaaagcaactcgaagaagatcggcggaaacgataagccgaaaatcacgatgacaggaaacagactcatgatgaccttgaataagaagcgtacaggtagtgagcagatgcgtttattatgtagctaacaatatattaacgtaacgattgccgcattatctacaatgtgtgatctaaatcacttttaagccagagtgaataatggaacgattaaaacgcatgtccgttttcgccaaagtggtcgaattaggttcattcaccgcagcggcccgccagcttcagatgagcgtttcctcgatcagtcagaccgtcgccaaactggaagatgagctgcaggtaaagctgctcaaccgcagcacccgcagccttggcttaactgaagcaggtaaaatctattaccagggctgccgtaggatgctgtttgaagcgcaggatgtccatgagcaattatacgcatttaacaatacccccatcgggacgctgcgcatcggctgctcttcaactatggcacagaatgttctggcgcgcataacggcgaaaatgctcaaagaataccccgggctctctgttaatctggtcaccggcatacctgcgccagacctgatcgccgacggccttgacgtggtgatccgcgtgggcgccctgcaggattccagccttttttcccgccgcctgggctcaatgccgatggtattatgcgccgctaaaagctatctggcgcaggctggcaatccagagaaaccggccgaccttgccggacatgcctggctggaatatagcgtgcggccggacaatgagtttgtcattatcgcgccggaagggatctcgacccgcctcaccccgcaggggcgcttcgtgaccaacgaccctatgacgctggtgcgctggctgaccgccggggtgggtatcgcctatgtaccgttaatgtgggcgatcgaagagatcaaccgcggtgagcttgagatcctgctgcccagctatcagtccgatccgcgaccggtctacgccctgtatacggaaaaggataaactgccgctgaaagtgcaggtctgtatcaactatctgacggagtattttgtcgacgtggcgaagatctatcagggcatgcacgggcgcgggatcgcccggtgaagcggttcccggcagcgccgggaaccaggtcaggatcaggcggtgccgccgacggtaaggttatcgaccttcagggtcggctggccgacgcccaccggcacgctctggccctctttgccacagacgccgacgccgttatccaggcgcaggtcgttgcccaccatcgaaatctgctgcatggtctcaatgccggagccaatcagcgtggcccctttcaccgccttcgtgaccttccctttttcgatcagataggcctcggaagtggagaagacgaatttaccggaggtgatatccacctgcccgccgccgaagttaggcgcaaagataccgtagtcgaccgattcgataatctcctgtggcgtcgactggcccgccagcatataggtgttggtcatacgcggcatcggcagatgggcatacgactcacgtcggccattgccggtcggtgcgacgcccatcaggcgcgcgttgagtttatcctgcatatagcctttcagaatgccgttttcgattagcacgttgtattgccccggcgtcccttcgtcatcaatggccaccgagccacggcgatcggcgatggtgccatcatccactacggtgcacagctcagaggcgactaattcccccatatggccgctaaagaccgaggtgccacgccggttgaaatcgccttccagcccatggccgaccgcttcatgcagcaggacgccaggccagccggcgccgagcaccaccggcagcatccccgcaggggcggcgaccgccgagaggttgaccagcgccatgcgcaccgcttctttcgcccaggcatcggcccgcacgtcgccctcctgggaggcgaggaaatagtcataaccaaaacgcccgccaccgccgctactgccgcgctcacgcttgccatcctcttccaccagcacgctgacggaaagacgaaccagcggacgaacgtcggcggccagagtgccatcggtggcggcgaccaggatcagctcatacaccccgctcaggctggctgaaacctcctgcacccgctggtccgccgcccgggcgactttgtctacccggcgcagaatatccagcttctcttcccgggtcatactctgcagcgggtcgatgctggtgtacagggcacgatgctctacggcgccgagggtctgcactttgccattgccggtgtcgcgcacaatggtccgcgccgcctgggcgctctgctccagcgccagtttgctgatctgatcggcgtaggcaaagcccgttttttcgccgctgacggcgcgcacgcctacgccctggtcgatattgtacgacccatctttaatgatgctgtcttccagaacccaggattcgtgatagctcgactgaaaatagagatcgccgtaatcgaggcggcgctcggtcagttgaccaagaatggcaaacaggtcctgatgattcaggccatttgccgacagtaattgttcacttaccaggttcagactcatcgttatgctactcgtttgttgccgcctgacaggcggaaatacagaaggctatctattgagattgcggcaattcccggcaatcgtcaaatcattgctttttattgctgcgcgccaggcgcagcacttcattgatctgcggctggtcaatcgggccggtgatgcggtagcgcagaatcgaaactttattccacagcggacccagcactttgctggcggcaaataccgccgcgccgacgatggggttgacggcaaaggccgccgccacgccgacggtcgcggagatctccggcgccaccaccgcctgcagatccagctggcgacgcaccagatcgaccgaccctttcatagcaatatccgcttcaaggccatccaccagcgtatcatcggtatgcagtacgccatccttaatccatgccgtactgttaatcgaatcgaagtaaaagccttcgctgaaggtatcgctgaaatcgaaacgcagtttacgcagcagggcatccacactcagcagacgcagcagctggccagcgtgcccggtactcaggtcggtaaactgccccttgcccaggtggcttttaatgatgccattgagcgacgcgacatcgggtgaccagggcggcgcgcgccagtgcagatcgtagtcgatatcaaacggcgaatccttcaccggcgtggagacgccaaagaaatccgcaaatgcatccgtcttattgccgtgcagtctgcctttcagcgaggttcgaacccctgaaggggcgttcacccacacgccgttggtcgtcagccggccaaacccggtatccaccaggccgttggagagcgttaaggtatcccctttgatcgccacatccccatcgatgcggccatatttttgtccccacagccagcattccgcgcagcgtagctgcagatcgggccagccatggaaatccagccgcgtcgccgtctggggggccacattctctgttgcgttctggccgctggcgctggccggattgaaatagagataacgcacatttgccagccacggagcattgtcgcgcatcgtcaatgtggcattgatctcacgcccctgcgcctcaacctgcgagccgccggcgaccggctgtgacatcagactgacgttgttccactgttgacccgcgagggccagcgacggcgtacgcagcacaatgcgcggtggaaagagcacgctgctgctcacttcatttgccgcgccgttctcgaagagcgccagccactgcgcgccatccatcggcggcaggttgagctcgataccggactgatcgggcagcggagagtaccctttgctgtcagtggtaaggatcgctctatccagcgtcagcttatgattgagcaaccagcggctgttaatatgattcttcgccccgatggagccggtcaggtcgaagctgctcaggccgccggcgacgttaattttgaccggaaggggttcgccggcgggcttactgactggcgaaggtaagcgactgctcacattcttcagatcgccgttgatatcgaccttatagctggcattgccatggtacggcagttcgatggcgaccttgccatcccacgggacgctaccgctcaacgcctcactcacggctttcggcagcagcccggtgcgcgacggctgccagttggcattcatcccgacatccaccagaaacgctttttcaccttcgcgggtggaaaaattgaggttcagcggctgattaaaccaggtcgcgctcaacgtttgactattgagatcgccattcacaaagctgaaattaccgctcaggttctgcagtgtagtatctaacggtttgataaacaggctattattctgcaggcgcacatcgcctttcgcggtggtcatctcgccgtcgagggggatattaagatgtaagcgagcgctcacatccccatccagctgcagggaatccagcgccgccccgagcgactctttcagcggcgtagtattaaagtaaggtccaacctcttttcccgggcctttgatatcggcatcaatcagcagtttttcctgcgcatagtccgggatcgcggcatcgagattgctggcggtcacgttgccaagcatcgctttatccgcctgcatccacaggccgttgttgataaaattgagatcgatgttcagcccggttagcgccggccagtccggttggaaggcaaaagtggcgttcttcagcggaacataaacctggaattggccttcattatgcggataagggaataaatgcggattgccgccatacaccagcgtcgcatcgctggcttgccccgctttaatcgcgccgctcagatagtccaccagcgctttgcccatcagattttccgggaaataacgccatgcctggccaccgtcattggtgctgatgcccgccagaatgcccagccagggatcgtccccctgcggttgcagatagcggaagccgccgcgggcgcgtacgcctgtcgcctgcacgtctatatcgcggccatcaagcataaaccctttgtcgtttttcacccaactgagcgtggcttcgccagcggctatctccagcggcgcgcggaagacgccggcatacggcatcagcgccttcgccatatgggcgcgtaattccccgtgctcaacgctgccattcagactgccggagaagtgttctgccccaggcaggagtttccactgcttccacgccagatcgctccactgcgcctgaaaacgcgttttctccgtcgcctgcagggggatatcgagagccagcaaattgattttgccgccaggctgcgtggtacgccagagttcgcccagagaaggcgccagcttatcagcaaacggctgtaacccgctcaggccgctgagggccaaattgctggcgcgaatacgtaactcatcgctacgctgacgatcgtcgccaccaacgtcctgcgccgggatccacgccatcgccagggctccgcttggccagggtttatcatcgatagcgatccgcgtatcgggaatataaaaggcccagctttgcttatcatgggagagatgcgccgtcaggttatccaccgacaaatgatggacttcgttatcgccctgccagctggcgcccccttttttcagccatacgtcgccgctggccacatcacctttttcaatggtcatccagccttcgaggctgaagcgggcgcttttcagggcgatattgtcctgcatccagcgtcccagccacggtttgacgtcgatatcatccgcctgcagccagacccggcctttattcagcaggccatcctcatcgcgaagatccatccgcacctgcatgacgccatgctggccggtgaggctggagaggctgagctgcccctcggcgcgatgacggttcctgccgttaagccatgtcagctgcggaaccgccagctccgcccgctgaccggaaagagtcaggaagctcagatggctgtcgcgcagagtaaagtgatcgaactgacgtaaaaagagatcgctgatgcggtcggttttcaggctttcgccaccgtcattggtctgaataggggtattggtatggacctgcagctgccagaaggtgaggtcgcggaactgccagcgcatatgcagcaggctctgccagacatccagcgccagggttacgcgcttgaccgccattgtgccgccatctttcagcccgacatggatatcgcgggcgtctaacgtcggaccaaaagtctgccagctggcggtgatctgcgaggcgtccaccggcgtaccggtgagggtggagatcttctccagcagctgcggacgccaggcgtcgagctgtggcaacacgagacgcaagccactcaccagcagcgcgacgataacaatcaatgttgccacggtgagcaataaaatcccgggcagtcgcctcacgcctctctccttgtcagccgcacaatgacgcggtgtcttacatcataaccacatcgaactgctcttgattatagagcggctcaatttgtaccttcacctgcttgccgacaaagatttccacttccgccagcgcatgcgactcttcccctttcagggtttccgccaccgcaggggaagcatagaccaggaagcgatcggaatcataagcatgatgtacgcggacgatctcacgcataatctcatagcacaccgtttccaccgactttaccgttccacgtccgtggcaggttgggcactcgttgcacagcacatgctccacgctttcacgggtgcgtttacgggtcatctccaccaggcccagctgggagaagccgttaatgctcgtcttcacccgatctttactcagcgcctgctctaaagagtgcaacacccgtcgacggtgatcttcattgttcatgtctatgaaatcaatgatgataatgccgccgagattacgcaaacgtagctggcgggctatcgcctgggtggcttcgatgttggtattgaagatcgtatcgtcaagattgcggtgcccgacaaaggccccggtgttgatatcgatggtggtcatcgcctcggtctggtcgatgatcagatagcccccggatttgagctcgactttacgctccagcgcgcgctgaatttcgttctcaacgtcaaagagatcgaatatcggctgacggccgctgtagtgttccagcttgctggtcatttccgggatatattcggcggtgaattcgagcaacgcctcataggtcaggcgcgagtcgacgcgaatgcgatccagttgcgcatcggcaaaatcacgcagcacgcgctgggccagagccagctcgccatacagctgatagcgggtctggttgcgctttttgcgctccatcaccttggtccatacgcgcttaagataagcggcatcggcggccatctcctgctcgtgaacgccttccgcagcggtgcgaatgataaacccgccctgctcatcgcaatattctgcgacgaccttttttaggcgctcgcgctcggcttcgctttcaatccgctgagagacccccacgtgggaggcgcctggcataaagaccagatagcgggaaggcagggtaatatcggtggtcagacgcgcgcctttggtacccagcggatctttaaccacctggaccatcagatcctggccctggcgcaccagctccgaaatatcgcgcacggtaaactgcttttgctcctcaccggcgacgcactcggtatgcggcatgatatcggaggcgtgaaggaacgccgccttatccagaccaatatctacaaaagccgcctgcattcccggcagcactcggctaacacgacctttgtagatattgcctactattccgcgtcgcgcttcacgctcaatatggatttcctgcagaataccgccatcaatatacgcaacgcgcgtttcggatggcgttacgttaactaataattcagccgtcatctttatccctttcctttacgcagtgagttaaagttactgagcaactcatacgtttccaccagcggtaagccgactacggcgtgatagctgccattaatcttcctgacgaagcaaccacccaacccttgaataccgtatgcacctgctttatctaaaggctcgccgctggccacataatcggcgatatcctgctcgctgagccgccggaaggtcacttccgtgaccaccagacagtccagcgtttgctgcttatccgccagcgccaccgcggtcatgacctgatgggtgtggccggaaagcaaacgcagcatcgctgcagcgtgttcggcgtcgcgcggtttttccagcacttcgccgttcaaaatgacaatcgtatccgctcccagcaccggcaaatcgcgggtggccatcgccaccccggcctgcgctttttcgcgcgccaggcggacgacatagtgctgggcgctctcctgcggctggcgctgctcctcgataccaggaaccagacgctcgaaagcgagaccaagctgagtcagcagttcctgccgacgcggggaaccagaagcgagatacagagttgtcatatcaaccttattgcactgcaaattgctgacgcactttacgcatcagcaggaagagccatggccagaggatgccgtttactacactactccagaatacttccggacggaaagagacgttgatcactaaaaactctgcccagaaaacaatgatatccacggccagggataacaacattaccaccagcgcctgttgccacagcgccaggttacggaacagctgatacttcagcgcgaccagataggcgacgatgcttaaagacagcgcgcgaacgccgagcgttgaaccgctgatgagatcaagaatagcccccatcacgaaacccgtccccacgtttacccggtgcggcaacgcgaggatccagtacagcaggatcaataatacccagttgggccggaaaacgctgatgtccgccggccagggcataatttgcagcaatagcgcgataagaaacgagagccagataacccagcgtccctggctacggtaacttgccactattgcccccctgcaggctgcgacggctgaggcggcgtcaacccggtggcgggcgccggcatctgcggccccatcgcatccggcgcaggcagtacctgcggcatcatctgcatcagacgttcgttagccacccgatgaacctcttccggggtcatcgggttagcgccattacgatcggcgccccacagcagcaacagatagcgcaagcgctgcagcccggccgtcggacgcgcctgaatcacggtataggcgcgctgggtgtccagtttcaccgaggagactaccccgaccggatacccttcagggaaacgaccgccgagaccggaggtcaccagcacgtcgccgacgcgaatatcggtattcgccggcagatgctcaagctggagatcgtccgtgcagccgttaccggcggcaatgacgcgaatgtcgttacgcagaacctggatcggcagcgcatgagtggcatcgcagatcagcagcactcggctggtcattttcgccacggccacgacctgccccaccacgcctttatcgctgataaccggctggccttcatagacgccgttcacgctgcctttgtcaataaccacctgatcgctgtaagggtcgttgaccgttgagatgacctgcgtcaccattttttgctcgtcctggcgcagcggcgagccaagcagttcacgcaggcgcgcgttctcctgcttgtactggcccagcatcagcagatcgctgtttttcagcaacagctcctggcgcagcgcgcggttttccagttcgagctggtcgcgggtagctagcgtctgcgatacgctgtcgagcagttcccggggaccattagagacaaagtagaaagggctgacggctgtatccatgtacgttctgatttgactgaacgtacccaggcggctgtcggcgataatcacgccaagcgccaccagcaccgccagaataaggcgaatctgtagcgaggggccacggctaaaaattggcttcataggctatgcgtattctcgtgtcagtaaagaccaggggcagctcgtatgccgccccggaccttcaggctgactactcttcgctaaacaggtcgccgccgtgcatgtcgatcatctccagcgccttgccgccgccacgcgctacgcaggtcagcggatcttcagcaaccacgactggaataccggtttcttccattaacagacggtccaggttgcgcagcagcgcaccaccgccggtgagaaccatcccgcgttcagagatatcagacgccagttccggcgggcactgctcaagggcaaccatgaccgcactcacgatgccggtcagaggctcctgcagcgcttcaagaatttcgtttgagttcagggtgaagccgcgtggcacgccttccgccaggttacgaccgcgcacttcaatttcgcgcacttcatcgcccgggtaagccgaaccgatttcatgcttgatacgttcagcggtcgcttcaccgatcagggagccgtagttacgacgcacgtaattgataacggcttcgtcgaagcggtcaccgccgatacgtacagaagaggaatagaccacgccgttcagggagataaccgccacctcagtggtaccgccaccgatatccaccaccatggagccggtcgcttcagaaaccggtaagcctgcgccaatcgctgccgccatcggctcttcgatcaggaagacttcacgggcgcctgcgccctgcgcggattcacgaatagcgcgacgttcgacctgggttgcgccaaccggtacacacaccagcacgcgcgggctcgggcgcataaagctgttgctgtgcacttgtttgataaagtgctgcagcatcttttccgtcacgaagaagtcagcgataacgccgtccttcatcgggcgaatcgccgcgatattacccggggtacggccgagcatctgcttcgcttcatgacccacggcggcgacgcttttcggcgatccggcacgatcctgacgaatggccaccacggaaggctcattcaatacgatgccttgtccttttacgtaaataagggtattcgcggtacccaggtcaatggacaggtcattggaaaacatgccacgaaatttttttaacatactaagggataatcctgaaagctggggcggaaaacaaaatccgcttactttaccaaccacacgcagcagcgacaaggcgcaaaaatcacctgctgcggtgaaaattagtgcagttcatttcctttgttacaaattttcccgactccgttcattgctgaaatcttcagcagcgctccacgcctgaatttgtaacctgtcaaaggagggtcactggcatttacattgcgatgatccggcaggtagacaagcacacccccttcacgatggcgcgcgttattctacgtgaaatcacgctaaacggcagatcaaaccgagtatctttgcgaatattttttcacatttgtgtcaagtggctgtgaggcggcaaaaaattccccctgcccgcccgtgacaccgcattgggacagtaccaaccactcgctgcggctgcgtacgcccgtcgcaaaaacttgcataggcatgcctttacaggcttccaccaggctttgcaccagcagttggttctcgctgcgcttttcgatgttgcgcgccagacccggatgcagtttgatcagctccgcatccagctgcttgatccagctggttccaaccagggttaaccccgcctgaaccactgccacccgaacgcccagagcgttaaccaatcgcataaccggctgcagacggccgatatattgacaaacatctgcctctgcaagttcaaaaataatccgctgacgctgcgatttttcacactgcatcaaggcatcgcgcagccagcgctggaaacgcggacggatcagcgactccaccgacagttggagcgccagattctcctcgggccagaagcctaaaaacggcagcaggcgcgttacctgcaggcggtcatactcctccgccaggccaaactgcagcaccatcggcatgtattccgctgcaatcacctcttctttaccgtcgtacatccgcgacatcagttcacgatgatgtacccgcccgtcgcgggtgacagctggtttttggtacaaccgcggcccgccgcggctcagcatctgttcgatcagcgttcgccagcgaacgttgccgcgacctttctccggaagggtgtcatcatagaccgaccagctgttgctgccctgcagcaccgcgttgcgcgtcgccgcttccgcatgttccatcacctgcgccgccgattgcccgctgcggaacgaacagatgccgatatgcatcatatcgtcgcgatcgaggatacgcgttggaggcagcgcatccatcgccttcagcaacaggccggcgatactatccgcctctttcaacgtacggtgcggcagcagcacggcgaagtcgctacggtgatagcgcgccaacagcgcgccggggtaacgcataataaaggtagagagcaggttgataagcgtaaagtaatgttcttcggccgccgcccgtccccagttgtcccgtagcagatcaaactccggcagacggatcatcatcacgatgccgtaggttcccaccttctcctggtcttccagcagcgtggccagctgattgtcaaaaaacaggcggttattcagtccggttttcgaatcctgcgccgcgtaggagcgaataagcgtatccatccggctgcgctgatcgctggcgaactgcagctccgacagcagcatatccagcgcgctactggtgctggccggccattcatagaccgacccgcgcacctgcggcccgcgctcgccgctcaggatacgcgtggaacgcagctccagcagctcctggccggccagctggcggcggatccagcggacggcgaagaaaataattaccaccatgaagccaatggagatcgacagcggggcagtgatcgacagcgaacggaaatagttcaccatcgggtcaacgtagaccagatgcagcgtaataccaggatgtttaagcgactgaaccgtgatctcacggaattgctcatggctgccgagcgggcgatagctatcgggtcgggaatggctgtagagcggtttgccgttgagcatgaaatcgatatgcacgatctcgatcggcgtcatcagctcatccaactgcggttcaagcttatcgaaagaggtggtgatgagccggttatccagcatggtcgccaccgcctgaacgcggttttcgaccttgttctcaatgccgttataaaaactcagcgaagcgccaatcagcgtgacaaagatggtcaggctagttagcagcgtaataaaggctgagaacttcgtcgttaatcgcatccctgtgttaactccgcgagtgaatgactacccgatgaaccatcaggctcccgtgccggcgcgcaccttgccgcaagcattaaccttttaaagcgcgacgcatactatcaaagatggcgagtctggcaatggaatgcgtattatcggtaaaagtatgccgatagcgagtatagtttgcagaaaaaatttgccaatcgtcgcccgcctgcggcctgcgccagaagcgctttaattttagacgcaggatggcaaccccgcgccggcggcgcaaattattaccggtttaccgtttggcctgcttgccgccctctttttccctgctaaagatgccgggtcatgcgcggtaaaggaaacgtcttgcgccactttccgatgattcctggacgaccgcgcctctgcttcggcggcggctcctcatcctaatgtgcaatttttcgtgacatattcgccattcatcgccgtctccgtcatgcttaggaaaacgcatgacggaggacaccatgaaaagaaaaaaactgacggaagccgacgtcacggccgaatccgtttttatgctcaagcggcgccaggtgctgaaaatgctgggtatcagcgcgacggcgctttcgcttcccgccgccgcgcaggccgatctgctggactggtttaaaggaaatgaccgcccgccggccccggcgggcaaggccctggagtttgctaaacccgccgagtggcaggctaatctgacgcttaccccggaagataaggtcgccggttacaataatttttatgaattcggcctcgataaagccgatccggcggcgaacgcgggtagcctgcgcaccgatccctggacgctcaccatcggtggcgaagtggcgaaacctctgacccttgaccatgacgatctgaccaaacgcttcccgctggaagagcgcatttatcgtatgcgctgtgtggaagcctggtcgatggtggtcccctgggtcggcttcccgctgcataaactgctggcgctggtggagcccaccagcagcgcgcgctatgtggccttcaaaaccctctatgctccggatcaaatgcccggccagaaagaccggtttatcggcggggggctcgcttacccttacgtggaggggctacggctggatgaagcgatgcacccgctgacgctactcaccgtcggggtgtatggcaaagcgctgccgccgcaaaacggcgcgccggtccgcctgaccgtgccgtggaagtacggttttaaaggcataaaatccattgttagtatcgagctgacccgcgagcggccgccaaccacctggaacctggcggcgccggacgaatacggcttcttcgctaacgtcaatccgcacgtcgatcacccccgctggtcgcaggctagcgagcggtttatcggcgccggcggcgtgctcgatgtgaagcgtcaaccgacgttgctgtttaatggctatgccgacgaagtggcgtcgctgtatcgcggcatgaatctgcgggagaacttctagtgcgtttcaccgtcaaacagatcgtctggctgaagattttacttcaccttgcggggtttttgccgctggtctggttattctgggccgggcaccagggctactttagcgccgatccagccaaggatatccagcactttaccggcagaatggcgcttaagtttctgctggcgacgctgctggtctctccgctggcgcgctatgcgaagcagccattattgattcgcgttcgtcgcctgttaggtttatggtgttttgcctgggcgacgctgcacctgaccagctataccctactggagctgggcattaacaatctggcgctgctgggctcggagattatcacccgcccctatctgacattgggcatgatcagctgggcgattctgctggcgctggcggtgacctccacgcaagcgatgcagcgaaaactggggcgtcgctggcaacttttacacaacttcgtctatctggtggcgatcctcgcgccgatacactacctgtggtcagtgaagatcgtctcgccgcagcccgttatatatgccctgctggcagcggggctattgacatggcgttacaagaagttccgccagtggtggcgcgcaatccggtaatgtgcagtttcccgcagatcctttatcaaccgcgactctttttcagatagcggttgataatcttccctgataagaccagtatttagctgccaattgctacgaaatcgttataatgtgcgactttggttttcctgacggggttttctgaccctgaaaaggtgacaagggcgcattgaaggtatatgttgttttttacccgaaaatggcaggagatcgccacacaatggcagtgaagtttcacattttgcttttgaatggtccaaacattaacatgctcggtacccgcgagcctgagaagtatggccctctcacgctggctgaaattgttaaccgtttaacatctgaagcggcggcgctgaatgtgagtctggatcacctgcagtccaacgcggagcatgcgttaatcgaccgaattcatcaggctaaagacaacgtggactatatcctgattaatccggccgcgttcacgcataccagcgtagcaatccgtgacgctttgctcgccgtgaacatcccgtttatcgagattcacctgagcaatgtgcatgcacgcgaacccttccgccagcactcgtatctgtcagatgtcgccgctggcgtcatttgcgggctgggggcggatggttattcatacgctttacagacggcggtaaaacgcctgtcacaatcacactaaacaaagagtacggaacccactcatggatattcgtaagattaaaaaactgatcgagctggttgaagaatcaggtatctccgaactggaaatttctgaaggcgaagagtctgttcgcatcagccgctctgcaccggccgcaagctatccggttatgcagcaggcttatgctgcgccgatgatgcagcctcaggcgcctgccgccgcgactgccgcaccagctgctgcggctgaagcgccggcgaaagcggaaatcagtggtcacatcgtacgttccccgatggttggtactttctatcgtacgccgagcccggacgcgaaagcgtttgtggaagttggccagaaagttaacgtgggcgacaccctgtgcatcgtcgaagcgatgaaaatgatgaaccagatcgaagccgacaaagccggcgtggtgaaagccattctgatcgaaagcggccaaccagtagaattcgacgagccgctggtagttatcgagtaacgaggcgaacatgctggataaaattgtcatcgctaaccgtggcgagatcgcactgcgcatcctgcgtgcctgtaaagaactgggcatcaagactgtcgctgtgcactccactgcggatcgcgatctaaaacacgtattgttagcggatgagacggtctgcatcggtccggctccgtccgtaaaaagctatctgaacattccggccattatcagcgccgctgagatcactggcgcggtagcgattcacccgggttatggcttcctctctgagaacgctaattttgctgagcaggttgagcgttccggtttcatcttcatcggcccgaaagccgacactatccgcctgatgggcgacaaagtgtccgccatcaccgccatgaagaaagctggcgttccgaccgttccaggttctgatggcccgctgggcgacgacatggacgctaaccgcgcccatgccaaacgcatcggctatccggtgatcatcaaagcctccggcggcggcggcggtcgcggtatgcgcgttgtacgtagcgacgctgaactggcgcaatccatctccatgaccaaagcggaagccaaagcggctttcaacaacgacatggtctacatggagaaatacctggaaaacccacgccacattgaaattcaggtgctggcggatggtcagggtaacgcgatctatctggctgaacgcgactgctccatgcagcgccgtcatcagaaagtggtcgaagaagcgccggcgccgggcatcaccccggaactgcgtcgctacatcggcgagcgttgcgcgaaagcctgtgtggatatcggctaccgcggggcgggtacctttgagttcctgttcgaaaacggcgagttctacttcattgaaatgaacacccgtatccaggtagagcatccggtaactgaaatgatcaccggcgttgacctgatcaaagagcagctgcgtatcgcagccggccagccgctgtctatcaagcaggatgaagtggtggttcgcggccatgcggtggaatgccgtatcaacgccgaagacccgaacaccttcctgccgagcccgggcaaaatcacccgtttccacgcgccgggtggctttggcgtgcgctgggagtcacatatttacgccggttacaccgtaccgccgtactatgactccatgatcggtaaactgatctgctacggcgaaagccgtgacgtggcgattgcccgcatgaagaatgcgctgcaggagctgatcatcgatggcatcaaaaccaacgtcgatctgcagatgcgcattatgagcgacgagaatttccagcatggtggcaccaatatccactatctggagaaaaaactcggcttgcaggaaaaataattctgctctctcagcaaaaggccgggtaaaccggccttttttctttttctctctcctcatctataccatgcggtacaatccccgctttcttcatcctcaagggacaaaaaatggacaaacgctttgttcaggcccacaaagaagcgcgctgggcgctgtggctgacccttctctaccttgccgcctggctggccgccgcctatttgccgggggtggctattggctttaccggcctgccacactggtttgaaatggcctgcctgctggtaccgctgctgttcattctgctgtgctgggcgatggtcaaactgattttccgcgatatttctctggaggacgatgatgcagtttgaggtcattattcccctgatcgcctacctggtggtggtgttcggtttatccctctacgccatgagaaaacgcgcctcaggtagctttcttaatgagtactttctcggcagccgctcgatgggcggcttcgtgctggccatgacgctaaccgccacctatatcagcgccagctcatttatcggcggacccggcgccgcctataaatacggcctgggctgggtgctgctggcgatgatccagctccccgccatctggctgtcgctgggcgtgctggggaaaaaattcgccatccttgcgcgtcgctataatgctgtcaccctcaatgacatgctgtttgcgcgctatcagagtcgcctgctggtctggctggccagcctgagtctgctggtggcctttgtcggcgccatgaccgtccagtttatcggcggcgcccgcctgctggagacggctgccggtattccttacgataccggcctgctgatcttcggggtcagcatcgcgctgtataccgcctatggcggctttcgcgccagcgtgctcaacgacacgatgcagggcatggtaatgctgatcggcacgatcgtgctgctggtgggcgtgatccacgccgccgggggggttggccatgcggtagagacgctgcagtcgatcgacgtcaagctggtgtccccgcagggcgcggaggatatcctctcgccaacctttatggcctcgttttgggtactggtctgcttcggcgttattggtctgccacataccgcagtgcgctgtatctcctacaaagacagcaaagccgtgcatcgcggcatcattatcggcaccatcgtggtggcgatcctgatgtttggcatgcatctggctggggcattaggccgggcggtgatccccgatttaaccgtgccggatctggtgatcccgacgctgatggttaaagtgcttccgccctttgccgccgggatcttccttgccgcgccgatggcggcgattatgtcgacgatcaatgcccaacttctgcaaagttccgctacgatcatcaaagatctgtacctgaactggcggccggatcaggcgactaacgaaaagcggcttaaacgcatgtccgccggcatcacgctcctgctgggggtcttgttgctgctcgcggcctggcggccgccggagatgataatctggctgaacctgctggccttcggcggcctggaagccgtcttcctgtggccgctggtgctgggcctttactgggaacgcgccaacgcggctggcgcgctgagcgccatgatcgtaggcggcgtcctgtatgccgtactggccacgctgaaagtgcagtttctgggctttcacccgatcgttcccgcgctgctgctgagtttgctggcgtttgtggcggggaaccgtttcggtcgtcccgccccacagtcccccattttgactactgataaataaagagttttgctatgccatggatccaactgaaactaaataccaccggcgcgaacgctgaagatcttagcgatgcgctgatggaggccggatcggtctcgatcaccttccaggatacgcacgatacgccggtatttgagccattgcccggggaaacccgcctgtggggggataccgacgtaatcggcctgttcgatgctgaaaccgatatgaaagcggtcgttgcccaactggagcagcatccgctgctgggcgccgggttcgcgcataagatcgagcaactggaagataaagactgggaacgggaatggatggataacttccaccccatgcgcttcggggagcggctatggatctgcccaagctggcgcgatgttccggatgaaaatgccgtcaacgtgatgctcgatccgggtctggcctttggcaccggtacgcatccgacgacatccttgtgtctgcagtggctggatggactcgacctcaacggaaaaacggtgattgatttcggctgcggctccggcatcctggcgattgccgcactgaagctgggggcggcaaaagcaatcgggattgatatcgacccgcaggctattcaggccagtcgtgataacgcgcagcgtaacggcgtttctgaacgcctggagctctatcttcctcaggaccaaccggagtcgatgaaagccgacgtggtggtcgcgaatatcctggcaggcccgttacgtgagctggcgccgttaatcagcgtcctgcccgtttcaggcggtttgctggggctttccggcatccttgccagccaggcggagagcgtctgtgaagcctatgccgatctcttcgcccttgacccggtggtcgagaaggaagagtggtgccggattaccggccggaaaaactaagcgcgatgcggcctacgggccgcatttttgtttccagtagccaccaaataatgccaggaaatgagaggcagatcgcactacagagcacttttttggctacaaaaacagcgttttatatcgccatgcggccagtttatccaagaaaaatcgagaagttttatgattttataaatggacacaaattatccatcatccattaaatcaatgattaatataagtatttattcatcccttttacgctagtcccggattcattgatctgcaacagaggattgctcaaagtttggcctttcatctcgtgcaaaaaatgcgtaatatacgccgccttgcagtcacagtatggtcatttcttaactcatgcgcatcggacaccaccagctcagaaatcgcctgatcgcagcgcccatggctggcattactgacagaccattccggacgctgtgctacgagatgggagcgggtttaaccgtttccgagatgatgtcttctaacccacaggtgtgggagagcgacaagtcccgtttacggatggtgcatatcgatgagcccggtattcgtaccgtgcaaatcgccggtagcgtgccggaagagatggctgccgccgcgcggattaacgtggaaagcggcgcccagattattgatatcaatatgggatgcccggcgaaaaaggtgaatcgcaagcttgcaggttcagccctcttgcagtaccccgaccaggtgaagtcgatcctgacggcggtcgttaacgcggtggacgttcctgtgactctcaagattcgcaccggttgggaaccggaacaccgtaactgcgtagagattgcccaactggccgaagagtgtggcattcaggctctgactattcacggacgcacccgcgcctgtttgtttaacggagacgctgagtacgacagtattcgggcagttaagcagaaagtttccattccgattatcgcgaatggcgacattactgacccgcttaaagccagagctgtgctcgactatacaggggctgatgccctgatgataggccgtgcagctcagggaagaccctggatctttcgggaaatccagcattatctggacactggagagctgctgcccccgctgccgctggcagaggtgaagcgcttgctttgtgcgcacgttcgggagttgcatgacttttatggtcaggcaaaagggtaccgaatcgcgcgtaaacacgtctcctggtatcttcaggaacatgctccagatgaccagtttcggcgcacattcaacgccattgaggatgccagcgaacagctggaggcgttggaggcatacttcgaaaattttgcgtaatagaaataaagagctgacagaactatgttcgaacaacgcgtaaattctgacgtactgaccgtttctaccgttaactctcaggatcaggtaactcaaaagcccctgcgtgactcggttaaacaggcactgaagaactattttgctcaactgaacggtcaggatgtgaatgacctgtatgagctggtactggctgaagttgaacagcccctgttggacatggtgatgcaatacacccgtggtaaccagacccgcgctgctctgatgatgggcatcaaccgcggtacgctgcgtaaaaaactgaaaaaatacggcatgaactgatactagtcagttgcttgcttgatataaaaggcgctcttcggcatggggaagcgccttttttattatctgcgccaacagacctcattactgattcaccagccgtagcgcaggccctcccgataaacgcgcagcacagaccaccgccattatattatccaccagcgcaggcgcctgctgataaagatcgaagcgttgcggatcgagcagccagtttttaatcagcccggaaaaagcactgtgtaaaacaattaatatcatctcaatgtttgtttcggctggcaatatattgttacgcacgcagcactgcaggatgccgccaatgagtgaataattaaaaccaatacgttggcgaatttcgtattccgaaagcatatcactggaaaactcacagcgctgataaagaatttgcatcagagcgcgctgtcgaggattcgcagcaatatagcgcaggcctgcaataaaccgctcgcgtaaagcatttagcggctcatgttcgtactctatggcctgactgggctgaatcaaatctctaagcggcggctgctgctgccacatttcattaaacagctccgtcttactggcaaaatgccagtacaccgcgccgcgagtcactcccgccgcatcggcgatatccgtcagggtggtgttggttactccgcgcagggcgaactgctggattgcggactcaatcaggagctgccgcgtgcgctgcgcctcttcttttgtttttcttgccatacaaggccccacttcccgataagcagatcatataggatattcttaattagaattaatctagcatttgccatgaagtattatttagcaaaaatgcagacaagttaatcctgatgcgaaaagagaattaattattcaagtgaatatcaccggaaaatacattcactgaaataatgtctatttatcaacttttacaattgcgataaatcgcaatactacagtgaccatttttttgtttttgcgtgccttgctgattgcttaaaaataagtatctcttacatccaacggcgtttatttgtaggatggcaaactgctttttgattccctctttctttcacagattcgccgcctgattgggtacgtaatctataaggaaccgccatgacgactcacgccagagtgacacttttatccggtttaattatctcggccttattgctaaccggttgcgataattctgacaaccagcaaccccatgcgcaggcgccgcaggtgacggtccatgtcgtgaacagcgcgccgctatcagtcaccaccgaactgccgggccgaacctctgcttttcgcgtagcggaagtccgcccccaggtgagcggtatcattctgaagcgtaactttgttgaaggaagtgatgtcgaagcaggccagtcgctctatcagatcgatccggcgacctaccaggcggcgtggaacagcgccaaaggcgatgaggccaaagccgaagccgcggccgctatcgcccatttgacggtgaaacgctacgttccactgctgggtactaaatatatcagccagcaggaatacgatcaggcagtggccaccgcccgccaggccgatgccgatgtcatcgccaccaaagctgccgtagaaacggcccgtatcaacctggcctacaccaaagtaacctcccccattagcgggcgcatcggtaaatcgagcgtcaccgaaggggcgctggtcaccaacggccaatcggatgccctggctaccgtccagcagctcgatcccatctatgttgacgtgacggagtccagtaatgacttcatgcgccttaagcaggaaagcctgcagcgcggcggtgatactaaaagcgttgagctggtcatggagaacggccaggcctatccgctcaaaggttcactgcagttttctgacgtcactgttgatgaaagtacgggctcaattactctgcgcgctatcttccctaacccgcagcatgtcctgctgccagggatgttcgtccgcgcccgcatagacgaaggcgtcgatccgcaggctatcctggtaccgcagcaaggggtgacccgcacgccgcgtggtgatgcctccgtgatgctggtgaatgacaaaaaccaggttgaaacccgggaagtggtcgcgactcaggccgttggcgataagtggcttatcaccagtgggctgaagccgggcgataaagtgattgtcagcggcttacagaaagtccgtccaggcgtcactgtcaaagcggaagcggagcgtgcggcgccggccgtgcaataaggatacccagccatgtctaagttttttattcatcgaccggtcttcgcctgggtgctggccatcattatgatgattgccggcggcctggccatcctgcagctgccgatagctcagtacccgacaatcgcccctcctgcggtcgcgatctccgccacctaccccggtgcagatgcccagaccgtacaggataccgtcacccaggttatcgagcagaatatgaacggcatcgacaacctgatgtatatgtcgtcgaccagcgactctgccggttcggtaaccattacgctcacctttaaatcgggtaccgatcccgatattgcccaggtacaggtgcaaaacaaactgcagctggccacgccgctgctgccccaggaagtacagcagcaagggattagcgtcgagaaatccagtagcagcttcctgttggtcgccggctttatctctgataacccgaccaccacccaggacgatatttctgactatgttgcctccaatgtcaaagatcctattagccgcctcaacggcgtgggcgatgtgcagctgttcggcgcgcagtacgctatgcgcgtctggctggatggcaacctgctgaataaatacaacctgacgccggtggacgtcatcaatgcgctgcaggtccagaacgatcagatcgccgcgggtcagctcggcggtacgccagcgctgaaaggccagcagttgaacgcgtcaatcatcgctcagacgcggctcaaagatccgcaggagtttggcaaggtcacgctgcgggtcaacgccgatggctctgtcgtccatctgaaagacgtcgcccgcattgagctggggggagagaactataacgttgtcgccagaattaacggtaaacctgcctctggtctgggtattaagcttgcgaccggcgccaacgccctggataccgccaccgcgattaaagcgaagctggccgagctgcagccctacttccctcaggggatgaaggtggtttatccgtatgatacgacccctttcgtcaaaatctccattcacgaagtggtcaaaacgctttttgaagcaattattctcgtctttcttgtcatgtatctgttcctgcagaacatgcgcgcaacgctcattccaaccattgccgtacccgtggtgctgttgggaaccttcgcggtattgtcgatgtttggctactccatcaacacgctgacaatgtttggcatggtgttggcgataggtctgctggtcgatgacgctatcgtagtagtggaaaacgtcgaacgtgtgatggttgaggagaagctctcgccaaaagaagcgacggaaaaatctatgtcgcagatccagggagcgctggtgggtatcgccatggtgctctccgcagtatttgtcccgatggcctttttcggcggctcaaccggcgcgatttatcgtcagttttcaatcaccatcgtctccgccatggcgctctccgtgctggttgcgctggtactgactccggcgctctgcgccacgttgttgaagccagcctcagctgaacaccatgagaaaaaaggatttttcggctggtttaacgcccgcttcgaccagagcgttaaccactataccaacagcgtcagcggtattttacgtggaactggccgttatctggtgatctacctgctgatcgtcgtggggatggccgtgctgttcatgcgcttgcccacgtcctttctgcccgacgaagaccagggcgtcttcctgaccatgatccagctgccgtccggtgctacccaggagcgcacgcagaaggtcctggatacggtgacagactactacctgcataacgagaaggccaacgtcgaaagcgtctttaccgttaacggcttcagcttcagcggccagggacaaaactccggtatggcgtttgtcagcctgaagccctgggaagcgcgcagcggcgatgaaaacagcgtggagtccatcatcaagcgggccaccgtagcctttagccagatcaaagacgccatggttttcccgttcaacatgccagccattattgagctgggtaccgccaccggcttcgactttgaactgatcgaccagggcggactcggtcataccgctctgacccaggcgcgcaatcaactgctgggcatggtgaaacagcatccggatcagctggttcgggtacgccctaatgggcttgaagatacccctcagttcaaactggatgtcgatcaggaaaaagcgcaggcgctgggcgtatcgctctccgatatcaatgaaacgatatcagccgcgctgggcggatactacgtcaatgactttattgaccgcggccgcgtgaaaaaagtgtacgttcaggctgatgcccacttccgtatgctgccgagcgacattaacaacatgtatgttcgtagcgccaacggcgaaatggtgccgttctccacctttgtcacttcacgctggatatatggctcgccgcgcctggagcgctacaacgggttgccatctatggagatcctcggtgaagcttcgccaggcaaaagtaccggggaagccatggcgctgatggaaacgctggccagtaaactgccgagcggcatcggttatgactggaccgggatgtcttaccaggaacggctctccggcaaccaggcgcctgcgctctatgccatctcgctgatcgtcgtcttcctgtgtctggcggcgctgtatgagagctggtcgatccccttctcagtcatgttagtggttccgctgggggtcattggcgcgctgttagccgccacgctgcgtgggctaaataatgacgtttacttccaggtcggactcttgaccacgatcggtttgtcggccaagaatgcgatcctgatcgtcgagttcgccaaggatctgatggagaaagaagggaaagggatcattgaggccacgctggaggcatcgcggatgcgcctgcggcctattctgatgacctctctggcctttattctcggggtcatgccgctggtgattagccatggtgccggcagcggggcgcagaatgcggttggcaccggcgtgatgggcgggatgctgaccgcgacgctgctggcaatcttctttgttccggtgttcttcgtggtcgttagacgacgctttacccggcacgctgaataactcggctatgtcttgaaggcgccccttgcgggcgctttttttcgcatgcaatattggcagccagctaaacgcgccacagtctggcaaccgccatcgcacgcagcatcgctgaatcacaatctttctctccatcttttctgcatattcccgggcttatcttcacgatatttacgcggctcatatattgagatgatttcggcctccggcccggacaatccgcggtgataaaataagccattccgttctgcactggctttcagtacaacccagcggattatccagaggtaatatcatgaaaaagtatttaatcgtggcgctgctggcctctctgctggcaggctgtgcccatgactctccctgcgtaccggtttatgactcgcaaggccgcttagtccataccaatacctgtatgaaaggcacaacagaagacaactgggaaaccgcaggcgcaatcgccgggggtgcggccgcggtagccggcctcacgttagggatcgttgctctgacccgctagatcgcttccccaaccgcagatacaggtgtatcccctgtatctgctccactccattccccaaagtaagcgatcattcaggctcttcctgacgatagttcgccagctttcttagccgttgttgttgccagagaccgctggcaatgagtcgtccatcgctatcggcaaacttttcagattcagggttcagaaccaacaaacaccaaaggcccggtcgaagagcgggcctttactctgatggtgagcaatgatggcgaacgtcctttccctctctccgggccgttgctgcgcaatgttcatatcgatgccagttagattttccctgggcagcaaagaagctcatcggcaaacaacagataacacaaaagcaaaaggcccagtctttcgactgggccttttgctttatttgatgcctggcgattccctactctcacatggggagaccccacactaccatcggcgctacgacgtttcacttctgagttcggcatggggtcaggtgggaccgccgcgctattgtcgccaggcaaattctttacaacgtgccgaactttaacctaaaaagtggtgctgatacccagagtcgaactggggacctcacccttaccaagggtgcgctctaccaactgagccatatcagcacgctaaatttgatgcctggcagttccctactctcacatggggagaccccacactaccatcggcgctacggcgtttcacttctgagttcggcatggggtcaggtgggaccaccgcgctagtgccgccaggcaaattctgttttatcaatacgtctcaccgacgtatcgattaatctgtatcagagctgaaaattctctcaaatcgccaaaacatcttcggcgttgtaaggttaagcctcacggttcattagtaccggttagctcaacgcatcgctgcgcttacacacccggcctatcaacgtcgtcgtcttcaacgttccttcaggagacttaaagtctcagggagaactcatctcggggcaagtttcgtgcttagatgctttcagcacttatctcttccgcatttagctaccgggcagtgccattggcatgacaacccgaacaccagtgatgcgtccactccggtcctctcgtactaggagcagcccccctcaattctccagcgcccacggcagatagggaccgaactgtctcacgacgttctaaacccagctcgcgtaccactttaaatggcgaacagccatacccttgggacctacttcagccccaggatgtgatgagccgacatcgaggtgccaaacaccgccgtcgatatgaactcttgggcggtatcagcctgttatccccggagtaccttttatccgttgagcgatggcccttccattcagaaccaccggatcactatgacctgctttcgcacctgctcgcgccgtcacgctcgcagtcaagctagcttatgccattgcactaacctcctgatgtccgaccaggattagctaaccttcgtgctcctccgttacgctttgggaggagaccgccccagtcaaactacccaccagacactgtccgcaaccccgataaggggccaacgttagaacatcaaacattaaagggtggtatttcaaggtcggctccacgcagactggcgtccacgcttcaaagcctcccacctatcctacacatcaaggctcaatgttcagtgtcaagctatagtaaaggttcacggggtctttccgtcttgccgcgggtacactgcatcttcacagcgagttcaatttcactgagtctcgggtggagacagcctggccatcattacgccattcgtgcaggtcggaacttacccgacaaggaatttcgctaccttaggaccgttatagttacggccgccgtttaccggggcttcgatcaagagcttctccttacggataaccccatcaattaaccttccggcaccgggcaggcgtcacaccgtatacgtccactttcgtgtttgcacagtgctgtgtttttaataaacagttgcagccagctggtatcttcgactggtctcagctccatccgcagggacttcacctacacaccagcgtgccttctcccgaagttacggcaccattttgcctagttccttcacccgagttctctcaagcgccttggtattctctacctgaccacctgtgtcggtttggggtacgatttaatgttacctgatgcttagaggcttttcctggaagcagggcatttgttacttcagcaccgtagtgcctcgtcatcacacctcagccttgattatccggatttgcctggacaatcagcctacatgcttaaaccgggacaaccgtcgcccggctaacatagccttctccgtccccccttcgcagtaacaccaagtacaggaatattaacctgtttcccatcgactacgcctttcggcctcgccttaggggtcgactcaccctgccccgattaacgttggacaggaacccttggtcttccggcgagcgggcttttcacccgctttatcgttacttatgtcagcattcgcacttctgatacctccagcatgcctcacagcacaccttcgcaggcttacagaacgctcccctacccaacaacacatagtgtcgctgccgcagcttcggtgcatggtttagccccgttacatcttccgcgcaggccgactcgaccagtgagctattacgctttctttaaatgatggctgcttctaagccaacatcctggctgtctgtgccttcccacatcgtttcccacttaaccatgactttgggaccttagctggcggtctgggttgtttccctcttcacgacggacgttagcacccgccgtgtgtctcccgtgataacattcttcggtattcgtagtttgcatcgggttggtaagtcgggatgaccccctagccgaaacagtgctctacccccgaagatgagttcacgaggcgctacctaaatagctttcggggagaaccagctatctcccggtttgattggcctttcacccccagccacaagtcatccgctaatttttcaacattagtcggttcggtcctccagttagtgttacccaaccttcaacctgcccatggctagatcaccgggtttcgggtctataccctgcaacttaacgcccagttaagactcggtttccctgcggctcccctatacggttaaccttgctacagaatataagtcgctgacccattatacaaaaggtacgcagtcacacccgaaggtgctcccactgcttgtacgtacacggtttcaggttctttttcactcccctcgccggggttcttttcgcctttccctcacggtactggttcactatcggtcagtcaggagtatttagccttggaggatggtccccccatattcagacaggataccacgtgtcccgccctactcttcgagttcacagcctgtgcattttggtgtacgggactatcaccctgtaccgtcggactttccagaccgttccactaacacacaagctgattcagactctgggctgctccccgttcgctcgccgctactgggggaatctcggttgatttcttttcctcggggtacttagatgtttcagttcccccggttcgcctcgttaacctatgtattcagttaacgatagtgcaacgaattgcactgggtttccccattcggacatcgccggctgtaacggttcatatcaccttaccgacgcttttcgcagattagcacgtccttcatcgcctctgactgccagggcatccaccgtgtacgcttagtcgcttaacctcacaacccgaagatgtttcacttctgattgcgaaaatttgagagactcgaacacacttaaacagtgtgtcgtttcaattttcagcttgatccagatttttaaagagcaaaatttcacaatgcacttcgcagtacattttgaaatttattatttatcaaacaatctgtgtgagcactacaaaggcaggttctttaaggtaaggaggtgatccaaccgcaggttcccctacggttaccttgttacgacttcaccccagtcatgaatcacaaagtggtaagcgccctcccgaaggttaagctacctacttcttttgcaacccactcccatggtgtgacgggcggtgtgtacaaggcccgggaacgtattcaccgtagcattctgatctacgattactagcgattccgacttcatggagtcgagttgcagactccaatccggactacgacatactttatgaggtccgcttgctctcgcgaggtcgcttctctttgtatatgccattgtagcacgtgtgtagccctggtcgtaagggccatgatgacttgacgtcatccccaccttcctccagtttatcactggcagtctcctttgagttcccggcctaaccgctggcaacaaaggataagggttgcgctcgttgcgggacttaacccaacatttcacaacacgagctgacgacagccatgcagcacctgtctcacagttcccgaaggcaccaatccatctctggaaagttctgtggatgtcaagaccaggtaaggttcttcgcgttgcatcgaattaaaccacatgctccaccgcttgtgcgggcccccgtcaattcatttgagttttaaccttgcggccgtactccccaggcggtcgatttaacgcgttagctccggaagccacgcctcaagggcacaacctccaaatcgacatcgtttacggcgtggactaccagggtatctaatcctgtttgctccccacgctttcgcacctgagcgtcagtctttgtccagggggccgccttcgccaccggtattcctccagatctctacgcatttcaccgctacacctggaattctacccccctctacaagactctagcctgccagtttcgaatgcagttcccaggttgagcccggggatttcacatccgacttgacagaccgcctgcgtgcgctttacgcccagtaattccgattaacgcttgcaccctccgtattaccgcggctgctggcacggagttagccggtgcttcttctgcgggtaacgtcaatcgccaaggttattaaccttaacgccttcctccccgctgaaagtgctttacaacccgaaggccttcttcacacacgcggcatggctgcatcaggcttgcgcccattgtgcaatattccccactgctgcctcccgtaggagtctggaccgtgtctcagttccagtgtggctggtcatcctctcagaccagctagggatcgtcgcctaggtgagccgttaccccacctactagctaatcccatctgggcacatctgatggcatgaggcccgaaggtcccccactttggtcttgcgacgttatgcggtattagctaccgtttccagtagttatccccctccatcaggcagtttcccagacattactcacccgtccgccgctcgtcacccgagagcaagctctctgtgctaccgctcgacttgcatgtgttaggcctgccgccagcgttcaatctgagccatgatcaaactcttcaatttaagtttgatgctcaaagaattaaacttcgtaatgaattacgtgttcactcttgagacttggtattcatttttcgtccgaggacgttaagaatccatgtcactttgagtgcccacacagattgtctgataaattgttaaagagcagttgcgacgcgctttagcgctctgtcgcgaggtggcgtatattacgctttcctctttcagagtcaacccgtttttcaggatttttctctgcaaccgaaccggctgtttgtgtgaagtgattcacatctgccgtgtcagtgggtgcgcattatagggatcccatttttttgcacaagccttttttcgatctttttttctgaatggtgatttttcacccttttcgccgtgtaattgcacgatttgctcaattttcaccgttttcaggggttgcacagggagataaaagccaccaaagtcttcttacgttcccgtattttgaggtctatatgtctgctcagctgcgcccctacaaagcatttttcccacaaatcggtcttcgcgtcatgattgacgcatccagcgttgtcatcggcgatgtcagaattgccgatgacgtcagcgtctggcctctggtggccattcgcggcgacgtcaactatgtatcgataggtcaacgcagcaatattcaggacggtagcgttctccatgtgacccataagtcctcttataagccggagggaaatccgctgatcattggtgaggatgtaactgttggtcataaagtgatgctgcacggctgcactatcggcaaccgcgtactggttggtatgggttcgatcttattagatggtgtcgtcgttggcgatgacgtcatgattggtgcgggcagtctggttccgcagaataaacagctggaaagcggctacctttactttggcaatccggtcaaacagatccgccccctgacagaggcggaacgggaaggactcaagtattcagcaaataactatgtgaaatggaaaaatgagtacctggatcaggataaccagatccagccctgagcatcttcctgaccatcgcggatcaatgcttctgcctcttcctctagatcccaacgatgttcctggaaggcggccagccactgcgctggcccctctgcgccgaaacgctgctgcaagatttggcctgaaattgcgcaggttaattgcatcccattcaccagcgcgggaaaaaccacgccctgccgttcggcatcccatgattcccggtcaggaaactgaatcgcctgattcatgcattcagttcctgctgcagcgtttcaatgaccggagcgatagccggcagaacgccgtgccatagcagaacagcatgggcggcttgcgccaccagcattcccagcccatcggcacagtggactgcgccatattgctggcaccagtgaagaaacggtgtcggccctttctggtaaaacatgtcatagcaatatacgtcagcgttgacaatagatgccgggatagctggtacatcaccgtctattccactggacgtcgcattgacgatcagatcgaatgtttccccggataaggtatccatctcccttgcgctaacgctcccggtatgggcgaagagagtggctaactcacgggcacgagaataggtgcgattcacgatcgtgacggcgcatcccagcgacagaagcggcaaaagaaccccgcgagatgccccaccagcaccaaccagcaggatccgttggcgtggcttaatgaatcccaggcgttccagatcgctcagaagaccaataccgtcggtgttgtcccccagtaaacggccatcttccaggcgtttcagggtgtttactgctcccgccagcgctgcgcgttctgtcagttcgtcggcacgcgcaaaggcttcctctttaaaaggaacggtgacgttggccccctttcctccttctgcaaagaactgattcagagaagagacaaaatcgtccagcggcgccagtacacgtccataaggatgagtaattcctaactggcgggcaaacagctgatgaatagcaggcgacttgctgtgcgcgatcggattaccaaaaacggcataggtttccatggttcacccctggcggaacagttcacccgtcagggcatcacggatttcagatgggttttgccggccgcccgtggcgccatccaccaccgggaagctgtcgccaaactgagcatggacctctgcggtagtacggcacggtggttgcccggtgagattggcgctggtcgaaaccagtggttttccgtaggcttcgcacaattcgattaccagcggatggttagtcacgcgtacggccagtgaatcaaaacgtccagtcagccagcgcggcgtttcaggacgcgccgggaatacaaacgtcaccggtcccggccagcaagagaagatggcttcccgctgtgagtcacttaaccgtgaatcatcaatatagggcttcagttgctcaaagctggcggcgataaggatcaatcctttctcaacaggacgctgcttcagctccagcaggcgcataacggccgtttcgctgtcagggtcgcagccgacgccaaacacggcttcggtgggataggcgatgacatgttcatttttcaggaccgccacggcatgggcgacggcttctgagggcaggttattgttcactgatttattccgccgggatcggctttccacattgtttactggcacagaagcgtctgagcccctgcgccgtcttcttttctattaacagcgggtaatggcattcagggcattcgcccgccgccggtttaaaattgataacgaactggcaatcaggatagcgatcgcaggagtgaaaggttttaccgaaacgggaacgacgctggaccagatggccttgtccgcactgcgggcaagcgatagccgtctcatcgggtttatcaatcagctcggtatgttcacattccggatagcggctacagccaatgaacatcccaaaacgcccctggcgtaacaccataaccgcaccgcacgatgggcactcttgcccctccagcaccttaacgatatggccgtccgcctggcttttcaggggacgaatatagtcacagtccggataatgcgaacagccgagaaacgggccatgtttcccggaacggatcaccagttcggccccgcactgcgggcagggctcatttttacgcaccgaaaacagtgctgatttggtcataacaactcgatgttgctgcaaaaagattaatgcagcataccttcatttacttcgaagagtaattcttccatttgctgataggcgttttcacagcccggaatattgaacagtaccatcaggatgacccatttcaggtcttccagctcaaattccgccgtatccagcgccagtacgcgctctatcaccatttctcgcgtttcgaggttcaacacctgaatctgctcgaggaagagtaaaaacccccggcaactggcatccagacgctggcactcctcttcggtatatacccgaagagagagcgggtcggaagcgagctgcatgggttcaacgagaccttcctgataatcagccagtttctcgagccacattaacgcgttatagatgtcttcccgctcaaaacccgcatcggtaagatcccgcgtcagtttgtcctgatccacgcgcatttctgcttcgctatggatgtaagtttcaaacaaatacatgagtacgtcgaacatggcttgccctccttaatcggacatagccgccgggtacagctgcgatccagcctgctaactccagttcaagtagctgagctacggttactggcacagattggccggcacgttcagcgacaacgtcaacaggtgttacctcatctcctacgttagccaggagctccggaaatggcaatgctacagacggctgatcgacgcaaatatttatcgaatcagacgtatcagtcagccaggccagctcgttatgccagtattccacaatatcctctggcgaggtcactggcaccgcaccttgcttaattaaccagtgcgggccttccgatcccggattgcctaccgggccaggcagggcgaacacatcccttccctgctccagggcgcagcggacggtgaccagcgatccgcttcgcaacgccgcctcaatcaccagcacgcccaggcttaagccgctgataatccggttgcgcctggggaaatgtgcgggaagcggcggcgtaatgagtggaaattcagataccagcgtaccgccattgtcgatgatctgccgggcgagggttgcatggcgccgcggataaacctgactcagcccattgaccagtaccgcgatagttttaccctccgccgccagcgcgccgcggtgcgcgaccccgtcaatgcctaacgccagcccactggtgatggtaatccctttatgcgccagcgtttcgctgaacagtttcccccagcgggcgccataccaggagtgcgagcgactgccaataacggcaagctgcgcgctgtgaagcagggcgaggccgccgctgaccagcaacgcgccggggtaatcagcgatagcctttaaccgcaatggatagcgcggatcgtcaccccgtaacagatgatgatccggttgttccagccagcgccgcgtctcgtcaagctcatgctcgtcaagccggaaaaataactttgcctgcgccgcggtcatcccgatggcatgcagcgcttcacgatcaacgctggcggctgcgcataagcgctgagcgacctctaccatcctgtcgccatacaagctactgaccttcatcagccgcagccaaatctcgtcgggcgtcatccttaccccctgccataagcggtattgacaatctttgcgattggacagtgagactgtcaattgcagggggttttgtctagaatagagctaataatcttatcaactcctgaatacgactctggaactttatggcagttttgcaagtgttacatattccggacgagcgccttcgcaaagtcgccgagccggtcaaagaagtgaatgcggaaattcagcgtatcgtcgatgatatgttcgacaccatgtacgccgaggaaggcatcggtctggccgcaacccaggtcgatatccatcagcgcattatcgttattgatgtgtcggaaaatcgtgaagagcagctggtattaattaacccggaaatgctggagaaagatggcgaaaccggtattgaagaaggctgcttgtctattcctgaacagcgcgccctggtgccgcgtgcggaaaaagtgaagatccgggcactggatcgcgatggtaagccgtttgaactggaggccgatggcctgctggctatctgtatccagcatgagatggatcacctggtcggcaaactgtttattgactatctgtcaccactcaaacaacagcgcattcgtcagaaggtagagaaactggatcgtttacgttcccgtgcctgataacaaggaataccgtgtcacaatcactacgtatcattttcgccggcacccctgattttgcagcgcgtcatcttgatgcgctgctgtcgtctgaacatcaggttgttggcgtattcactcagcctgatcgccctgctggtcgcggcaaaaaattgatgccaagcccggtaaaagtactggcagaagcccataacttacctgtgtttcagccatcctccctgcgtccgcaagataaccagcggttagtcgccgatctcggcgccgatattatggtggtagtggcgtacggtctgattctgcctaaagcggtgctggagatgccccgtctgggctgtatcaacgttcacggctcgctgctaccgcgctggcgtggcgcagcgcctattcagcgttcactgtgggcgggggatagcgaaactggcgtaaccattatgcagatggacgtcggccttgatacgggggatatgctgtataagctttcctgccccattaccgcagaggataccagcggcagcctgtacgataagctggccgagctcggccctcaggggctgctggcaacgttagcccagctggccaacggcaccgcacggcctgaagtacaagatgaatcgctggtgtgccatgccgaaaagctgagtaaagaagaggctcgtatcgattggtcgctttccgctgcgcagttggaacgctgcatccgcgcgtttaatccgtggccaatgagctggctggaaattgacggacaaccggtaaaagtgtggcgggcatcggtcatcgccgaagccgctcacgccgaaccgggtactatcgtggcagcaaccaaacagggtattcaggtcgccacgggggatgggatcctcagcctggagtcgctacagcctgcgggtaaaaaagcgatgagcgcccaggacttactcaattcccgccgggagtggtttatccctggcacccgtctcgcctgacggtcgtctcttctgaagcccgggttcgccgggcatttttatttttgcgcttatgaaaaagaatataaatttacgcagcctggccgcccaggctatcgaacaagttgttgaaaaagggcagtctttaagcaacgtactgccccctctacagcagaaagtcagcgataaagataaagcgctactgcaggagttgtgctttggtgtactacgtactctaagccagctggagtggcttatcagcaagctaatggcgcgtccgatgaccggcaaacagcgcaccgtgcactttctgatcatggttggtctctatcagttactctacacccgcattcccccgcacgccgcgctggcggaaacggtagaaggcgcggtggccattaaacgcccgcagcttaaagggctgatcaacggcgtgctacgccagttccagcgccagcaggaagcgttgttagccgaatttgctgagcatgaaaaccgctatcttcatcccaaatggctgctgaaacgcctgcagcaggcctggccggagcagtggcaggagatcgtcgatgcgaacaaccagcgcccgccgatgtggctgcgcgttaaccgcaaccatcattcccgggatgagtggcttgccctgcttaacgaggccggtttagagggcttcacccaccctgattatccggacgccgtacgcctggccacccctgccccggtccacgcgttaccaggatttgatgaaggttgggtaaccgttcaggacgcctcggcccagggctgtatgcgctacctgcaaccggaaaatggcgaacgcatcctcgatctctgcgccgcgccgggcgggaagacgacgcatattctggaagtcgccccccagtctcaggtcatggcggtggatattgatgaacagcgtctgtcccgcgtctatgacaacctgaaacggctgggcatgaaagccgaagtcaagcagggcgatggccgcttccctgagcagtggtgtggcaatgagcagttcgatcgtattctgctggatgccccctgctccgcaaccggcgttattcgccgccatccggatatcaaatggctgcgccgggatcgggatatcgccgagttagcccagctgcaggccgagatcctcaatgccacctggacgcacctgaagcctggcggcacgctggtttacgcaacctgttctattctgccggaagagaacagtcagcaaattgccgccttcctcgcgcgaaccccggatgcagaacttcacgccaccggcacgccggcgagccccgggcagcaaaatctgccgggcgtggaagaaggtgatggcttcttttacgctaagctaatcaaacgtcggaactaatgggtcactgcagatgaagattattattctgggcgccggccaggtcggcggcacgctggcggaaaacctcgtcggcgagaacaatgatattacgctggttgataccaatggcgaccgtctgcgcagcctgcaggataagttcgacctgcgtgtcgtccaggggcatggctctcaccctcgcgtactgcgcgaggcgggagccgatgatgccgatatgctggtagcggtcactagttcggacgaaaccaacatggtggcctgccaggtcgcttactcattgttcaatacgccaaaccgcatagcgcgtattcgtgcgcctgattacgttcgtgatgcggaaaagctcttcaactctgaagcggtacccatcgatcacttaatcgctccggaacaactggtcatcgacaacatccaccgtctgatcgaatatcccggcgcgctgcaggtcgtgaacttcgccgaaggaaaagtcagtcttgcggtagtaaaagcctattatggtggcccgctggtggggaatgccttatccactatgcgggagcatatgccgcatatcgatacgcgcgtggccgccattttccgccacgatcgccccatccgcccgcagggttcgacgattgtcgaggccggagatgaagtcttctttattgccgcctcgcagcatattcgcgcggtcatgagcgaactgcagcgactggaaaagccgtataagcgtattatgctggtcggcgggggcaatattggcgcgggtctggcccataagctggaaaaagattacagcgttaagcttatcgaacgtaatcagcagcgagccgctgagctggcggaaaagctgcagcatactatcgtcttctacggggatgcatcggaccaggagctgttggctgaagagcatattgaccaggtggacctgtttattgccgtcactaacgacgacgaagccaatattatgtcggctatgttggccaagcgaatgggcgcgaaaaaagtgatggtgctaatccagcgcagagcctacgtggatctggtccagggtagcgtcatcgatattgcgatttcgcctcagcaggccacaatttccgcactcctcagtcatgtccgtaaagccgatattgtcggcgtctcctccttgcgccgcggcgttgcagaagcgattgaggcagtcgcgcacggcgatgagagcacctcccgggtagtcgggcgttcgatcgatgagatcaaacttccaccgggcacgatcatcggcgccgtcgtgcggggcaatgacgtgatgatcgccaataataatctacggatcgagcagggcgaccatgtgatcatgtttttgaccgataagaagtttatttccgatgtcgaaaggctgttccagccaagtcctttcttcctgtaattcccagggcgccgaacaggcgcctttttattatcccttattattcaaaggttaatattttgcagtaactatctgctgggaatggcaaatgaaaatacatttgttaaacttacaacgtcagctggcacaaggagaataaaatgagttttttaaaagagtttcgcgaattcgcgatgcgcgggaacgttgtcgatttggcagtgggtgtgatcatcggtgcagcattcggtaaaattgtttcatcactggtcgcggatattattatgccgccactcggcctgttgattggcgggatcgattttaaacagtttgccgtcacgctacgtgatgcccagggcgatgtcccggctgtggtgatgcattatggggtattcattcagaacgttttcgatttcatcatcgtcgcgtttgccatcttcatggcgattaaattgatgaataagttaaatcgtaagaaagaagaggctccggcggcaccgccagctccctctaaagaagaagttctgctgagcgaaattcgcgatctgctgaaagaacaaaacaaccgttcttaatcagcagagaaagcagaaggccagtggtaaaaaagcgattcgcttgcttgccactggcctcccgatcaattcttcctgcatgtttatctttacgttgatagcttcctttccctttcttgtttttctctacgcgctgcctgaataacggatcgtggagaagtgcctcaatggcgttatctttaatttgtcctttagtatgctgatagcgactcatagttactccggtatatgtataaactcggcgcgagtgtagatccgcgcgtttaaaaaatcaacgtccgccattgccgttgctggccccttgttcaagggcctcaaggatagaacagtaaacgctgctgtgggcagtgccgcaacaggcatcgttgagccgctgcagagagcggcgcatcgtctgtagctctttaatccgcgcctcaacttcacttaatcgcgcctgaacgatccctttcgactcctgacaggtatgatgctccggatcgatgcggatcgacaataattcgcggatcgcttccagggtgaaacccagttgtcgggcataacgaataaagcgcagccgttgaagatcgttatccgagtacagacgaaatcctccctcggtgcgtatgtcatgatccatcatctgctgcttttcatagtagcggatggtatcaggcgtcacgtcagccagttttgccaattcaccaatacgatacatatttactcctgatttattttttgcagcaacgcatcggcgtactcaccgcgtaaaaagtcggtgttcagacctgcctgacgtaacttcagctcgagcagggcaaggcgtttgctaagttcggcatgacgcggatcgtcctgacggacgccgttcaataagtctgccagagccaacgcctctttgcgttgctccagttccggagggagacatcctgcatttttcagaaggcgatagcctgcccgcaactccgccggcacatgtgaatcgtcatcgagagtcagcggttctccgctgccgggtaaattatcgaactcacctttggtttgggcatcgaggatatgacgttccgcccactgatccagcaaccacattctacggctccaggggatgaacaaaaagagtacagatagtgtagtgaaatggggatggggtagatataaaaaaacccgcctgggcgggtttttttacgttactacagattactctgcagcagcttctgctttcggctcagcacgatcaaccagctcgatgtatgccatcggcgcgttgtcgcctgcacggaagccacacttcagaatgcgagtgtaaccaccggcgcggctcgcgaaacgcgggcccagctcgttaaacagttttgccacgatctcgttatcacgagtgcgggcgaatgccagacgacgattagcaacgctatcagtcttggcaagagtaatcagcggctcaactacgcgacgcagttctttcgctttcggcagggtcgtcttgatgatttcatgacgaaccagcgaacctgccatgttacggaacatagcctggcgatggctgctgttgcggttcagttgacgaccactcttacgatggcgcatgaccttatccttctcagtaaaaccttaacctgtgatccggttactcgtcagcaatgcttgctggtggccagttttccaggcgcatgcccagagacagtccacgggaagccagcacgtctttaatctcagtaagagattttttacccaggttcggcgttttcagcaactcaacctcggtacgctgtaccagatcaccgatatagtggatagcttctgccttgaggcagttagcagagcggacagtcaattccagatcgtcaacagggcgcagcaggatcggatcgaattctggtttctcttctttcacttctggctgacgtacatcacgtaggtcaacaaaagcttccagttgttcagccaggatggttgccgcacgacgaatcgcctcttcaggatcgattgtgccgttggtttccatttcgatgaccagcttgtccaggtcggtacgctgttctacacgcgcagcttcaacattgtaggcaatacgctctacagggctgtagcaggcgtcgaccagcagacggccgattgggcgctcatcttcttccgaatgaattcgggcagaagccggcacataaccgcgaccgcgctgaactttgatacgcatgctaatagcagcgttctcatcagtcaggtggcaaatcacgtgctgcggcttgacgatttcgacatcaccgtcgtgggtaatgtcggctgcggtcacagggccaatgccagatttattcaaagtaaggatgacttcatctttaccctgaactctcaccgccagccctttcaggttgagcaggatttcaaggatgtcttcctgaacgccttctttggtgctgtactcgtgcagtacaccatcaatctcaacctcggtcaccgcgcaacccggcatcgatgagagcagaatacggcgcagtgcgttacccagagtatggccgaagccacgctctaaaggctcaagggtcaccttggcgtgcgtcgaactcacttgctcgatatcgaccaggcgcggttttagaaactctgtcacagaaccctgcattgtgtcctctctttggtactaagctttacttggagtaaagctcgacgatcaggtgttcgttaatgtccgcagacagatcagaacgctccggctgacgcttgaacgtaccttccatcttgccagcatcaacttccagccaggttggcttttcacgctgctcagccagctccagagcggctttcacgcgagattgctttttcgctttctcacgaatgctgacaacgtcattcgctttaacctgataagaagcgatgttaacaacacgaccgtttaccataatcgctttgtggctaaccagctggcgtgcttcagcacgagtggcgccgaagcccatacggtatacaacgttgtccagacgaccttccagcagagccaacaggttttcaccggtgttgcctttcagacgtgctgcttctttatagtagttacggaactgacgctccagcacaccgtacatacggcgaactttttgcttttcacgcaactgcacaccatagtcagacagacgcggcttacgcgcaccgtgctggccaggagcttgttcaattttacacttggtatcgatcgcgcgaacgccagacttaaggaataagtcggtgccctcacgacggctcagcttgagcttaggacccaaatatcttgccattttctttctccaactaacctggaaaacgcagcgttatacgcgacgttttttcggcggacgacaaccgttatgagggatcggagtcacatcagtaatattagtgatgcggaaaccagcggcgttcagtgcacgaatggtagattcgcgacccggacccggacctttgaccataacttccagattcttgatgccgtattcttttacggcttctgcgcaacgctctgctgcaacctgagctgcgaacggagtggatttgcgagaaccacggaaaccggaaccaccggctgttgcccaacccagtgcgttaccctgacgatcagtgatggtaacgatggtgttgttaaaagaagcatggatatgagccacgccgtcagagacttgttttcttacacgcttacgtgcacgaattggtgcctttgccattattcaatcaccccgattatttcttgatcggtttacgcggacccttacgggtacgtgcgttggtcttggtacgctgaccgcgaaccgggagaccacgacgatgacgcaaaccacggtagcaaccaaggtccatcagacgcttgatgctcagggtgatttcacggcgcagatcaccttcaacgacaaatttacctactgcttcacgcagaatatcaatttgttcttcagacagctcactgatcttaacattttcagcgatgcccgtttcagcgcagatggctttagaacgggttttgccgataccgaaaatagcggttaaagcgataacggtatgtttgtgatcaggaatgttaatgcctgctatacgggccactatgcactcctactatttaatatgtacgcaccatgctgaaaagcccgttttcaggatactcaaatggaaacgtacagacatacaaaagattggctggctaatctagccagctcaatccaactttgcaagaaaaatatgcgaaaaaatcagccttggcgctgtttatgcttcggctcggcactgcaaatcacacggatgacaccatcacgcttaacgattttgcagttacggcataatttcttgacggaagcacgaactttcatttttactctccgtaacttctcgggcgaccagttttaacggccgtagcctttcaggttcgccttcttcaatgcagactcatactgactggacatcatcagagtttgcacttgagccataaagtccataatcacgacaacaacgataagcagcgaggtcccaccgaagtagaacggcactttcatcgcgtcacgcatgaactccgggatcaggcagataaaagtaatgtacaacgcaccaaccagagtcaggcgagtcatcactttatcgatatacttcgccgtttgctctcccggacgaattcctggtacaaatgcaccggacttcttcaggttatctgctgtttcacgcgggttgaaaaccaacgccgtgtagaagaaacagaagaagatgattgcagacgcatagagtaacacataaagcggttgcccaggctgcaaatacagcgaaattgttgtcagccagttccaaccagtaccacccccgaaccatgacgtgatggttgccgggaacagtataatactggaagcgaagattgccgggattacccccgccatattcactttcagcggtaaatgtgtgctctgtgcagcatagacacgacgaccctgttgacgtttcgcgtagtttaccacaatgcggcgttgaccacgctcaacgaatacaacaaagaaggtcactgcaaatactaatactgcaaccaacagcaacaggaggaagtgcaggtcgccttgacgcgcttgctcgatagtatgggcgatggccggcgggagtcccgcaacgataccggcgaagataatgatcgagataccgttaccgataccacgttcagtgatctgttcgccgagccacatcaggaacatagtccctgtgaccagactgacaacagcggtgaaatagaatgcaaagcctggattaatcaccaggccttgcataccaggcatattcggcagaccggtagcaataccgatcgactggaatatcgccagcaccagagtaccgtagcgggtgtactggctgatcttacgacgaccagactccccttctttcttcagttccgccagcggttgataaaccaccgtcagcagctgcacgatgatcgatgccgaaatgtacggcataatccccagcgcaaagatagaagcacggctgagagcaccaccagagaacatgttgaacatttcaatgatggtgcctcgctgttgctcaagcagtttggcaagtacagcggcatcaataccagggatcggaataaaagagccaatacggaacactatcagcgcaccgaccacaaacagaagtctgcgtttcagttcgccaaggccacctttggcactttgaaaatctaatcccggttgtttagccatctgctacttattcctcaattttaccgccagcagcttcgatagcagcacgagcacctttagtcacacgcaggccacgaacagttaccggacgagttacctcaccagacaggatcactttcgcgaactcgatctggacaccgataatgttagccgctttcagcgcgttcaggtctactacatcgccttctacgtgagccagatcggagagacggatctctgcggtgatcatcgctttacgagaagtgaagccgaatttcggcagacgacggtacagaggcatctgaccaccctcgaaaccgcgacgtacgccaccgccagaacgagatttctgacctttgtgaccacgaccaccggttttaccgaggccagaaccgataccacgacccaggcgtttacccgcctttttggagccttcggccggagacagagtatttaaacgcatctcttactcctcaactttaaccatgaaggaaaccgcgttgaccataccacgaacagcaggagtatcctcgcgctctacggtgtgaccaatacgacgcagacccaggccaagcagcgttgccttgtgtttcggcagacgaccgattgcactgcgggtttgagtaattttaatagtctttgccatggtttatttccccagaatttcttcaacggatttaccacgcttggcagcgaccatatccggggacttcatgttttccagaccgtcgatagttgcacgaaccacgttaattgggttagtggaaccatacgctttagccagaacgttacgaaccccagcgacttccagaacggcgcgcattgcaccaccggcgatgataccggtaccttcggaagccggctgcatgaatacacgagaacccgtgtgagtacccttaaccgggtgctgcagggtgccgtggttcagcgcgacgttaatcatattgcgacgggctttttccatcgctttctggatcgctgctggaacttcacgcgctttaccgtaaccaaaaccaacgcgaccgttaccatcgcctactacagtcagagctgtgaaggagaaaatacgaccacctttaacggttttagatacgcggtttaccgcgatcagcttttcctgcagttcgccagcttgtttttcgatgtgagccatcttacacctctaccttagaactgaaggccagcttcacgggcagcatctgccagtgcctggacacgaccatgatattggaacccggaacggtcaaaggaaacatctttgatgcctttttccagagcgcgttcagcgacagctttacccacagctgctgcagcgtctttgttaccggtgtacttcagttgttcagcgatagctttttctacagtagaagcagctaccagaacttcagaaccattcggtgcaattacctgtgcgtaaatgtgacgcggggtacgatgtaccaccaggcgagttgcgcccagctcctggagcttgcggcgtgcgcgggtcgcacgacggatacgagcagatttcttatccatagtgttaccttacttcttcttagcctctttggtacgcacgacttcgtcggcgtaacgaacacccttgcctttgtaaggctcaggacgacggtaggcgcgcagatctgctgcaacctggccgatcacctgcttatcagcgcctttcagcacgatttcagtctgagtcggacattctgcagtgatacccgcaggcagctgatgatcaaccgggtgagagaaacctaaagccaggtttactacattccctttgaccgctgcacgataacctacaccaaccagctgcagcttcttagtgaagccttcggtaacaccgataaccattgagttcagcagggcacgcgcggtaccagcctgagcccaaccgtctgcgtaaccatcacgcggaccgaaggtcagtgcattatctgcatgtttaacttcaacagcatcgttgagagtacgagtcagctcgccgtttttacctttgatcgtaataacctgaccgttgatttttacatcaacgccggcaggaacaacgaccggtgctttagcaacacgagacattttttcctccgattaggctacgtagcagataatttcgccaccaagaccagcctggcgcgctgcacgatcagtcataacacctttagaggtagaaacaactgcgatacccagaccggccataactttcggcagctcatcttttttcttatagatgcgcagacctgggcggctgacacgctgaatgctttctacaacagctttgccctggaaatacttgagagtaagttccagttcaggcttggtgtcgccttcaactttaaaatcttcgataaaaccttcttccttcagcacgttggcgattgccactttcagcttggaggaaggcatggtgaccgcagctttgttcgcggcctgaccgttacggatacgggtcagcatatccgcgatcggatcttgcatgctcatctgtctttactcccgtgattcaattggtgacaattaccagctagcctttttcagacccgggatttcaccgcgcatagcggcttcacggaccttaatacggctcaacccgaacttccgcaggaaaccatgcggacgacctgtttgacggcagcggttacgctgacgagacgggctggaatcacgcggcagagtctgcagcttgagaacggcattccaacgatcttcgtcggttgcgttcacatcagagatgatagctttcagttcagcgcgtttagcgaagaatttatcagctaaagccacgcgctttacttcgcgtgctttcattgattgcttagccattaagtaaccctaccttacttgcggaacgggaagtcaaaggcagccagcagagcacggccttcttcgtcagatttcgcagtagtggtaatggtaatatccaaaccacgaacgcggtcgactttatcgtagtcgatttctgggaagatgatctgctcacggacacccatgctgtagttgccacgaccgtcgaaagacttagcggacaggccgcggaagtcacgaatacgcggtacagcaatagtgatcaggcgctcaaagaactcccacatgcgttcgccacgcagagttactttacagccgatcggatagccctgacggattttgaagcctgcaactgatttgcgtgctttggtgatcagcggtttttgaccggagattgctgccaggtcagctgctgcgttatccagcagtttcttgtcagcgatcgcttcaccaacacccatgttcagggtgatcttctcgacccgagggacttgcatgacagaattgtagttaaactcagtcatgagtttcttaactacttcgtctttgtagtaatcatgcagtttcgccatcgtactactccaaattacttgatagtttcgctgttagacttgaagaaacggacttttttaccgtcttcgaatctaaagcctacacggtcagccttgccggttgccgcattgaagattgcaacgttagaaacctgaattgcagcttctttttcaacgatgccgcctggttggttcagagccggaaccggcttctggtgtttcttaaccaggttgataccttcaacaatgaccttgccggaagacaggacattcttaactttaccgcgcttacctttatctttaccggttaacacgataacttcgtcatcacgacggattttcgctgccatgattcgctccttagagtacttctggtgccagagagataattttcatgaacttctcggtacgaagttcacgagttaccggcccaaaaatacgcgtaccgataggctgctcgctgttattgttcagaataacgcatgcattaccatcgaagcgaatgacagaaccgtccgggcgacgaacacccttcttggtgcgcaccactaccgccttcagcacatcaccttttttgaccttaccacgcggaattgcttctttgatggtgatcttgatgatgtcgcctacgcctgcgtagcgacggtgcgagccacccagaaccttgatacacattacgcgacgtgcaccggagttgtcggcgacgttcagcatagtctgttcttggatcattttagtgctccgctaatgtcaactactactgagacccgaaaattagggtcgttaaaaagccccatatcgagggcgcggcattataacaccacaaaccagatatgggtagaaaaaataaacggctcatcgctgagccgtttatccgtatcgagaatgcgtactctattacagaaccgctttctctacaacgcgaaccagcgtccaggacttagtcttggacagcggacggcattcgcggatttcaaccttgtcgccgataccgcattcgttgttctcgtcatgtacgtgcagtttggtcgtacgtttgatgaatttaccgtaaaccgggtgtttcaccatacgttcgatagcaacaacaatggatttctccattttgtcgctaactacgcgaccttgcagagtacggattttatcggtcattacgcacccgccttctgagtcagtaaagtcttaacgcgtgcaacatcacgacgcacttgcttcagcagatgagtctgttgcagctggccacttgcagcctgcatgcgcaggttgaactgctcacgcagcaggttcagcagctcagcgttcagctcttcaacgcttttttcacgcagctcttttgctttcattacatcaccgtcttagttacaaaggtggttttgatcggcagtttcgctgctgccaggccgaatgcttcacgggccagctcttccggtacaccgtccatttcatacaggactttacccggctgaatcaaggcaacccagtactccacgttacctttacctttacccatacgaacttccagcggcttctcggtgatcggtttgtccgggaatacacggatccagatcttaccttgacgcttaactgcacgggtcatagcacgacgtgctgcttcgatctgacgtgcagtcagacgaccacggccaacagctttcagaccgaaagtgccgaagctaacatccgtaccctgcgccagaccacggttgcggcctttgtgcactttacggaattttgtacgctttggttgtaacatcagcgacgctccttatttacggcctttacgctgctgctttttaggttgagcagccggttccggttgttcaacagcagccataccacccaggatctcacctttgaagatccataccttaacgccgattacaccgtaagtggtgtgcgcttcagaggtgttgtagtcgatgtcagcacgcagagtgtgcagcggtacgcgaccttcacggtaccattcggtacgtgcgatttccgcgccgcccagacggccgctaacttcaactttgatacctttagcgcccagacgcattgcgttctgtacagcacgcttcatcgcacgacggaacataacgcgacgttccagctgagaagtgatgctgtcagcaaccagttttgcgtccagttcaggtttacgaacttcggcgatattgatctgtgcaggtacgccagcgatatccgctacgaccttgcgcagtttttctacgtcttcgcctttcttaccgataacgatacccgggcgagcggtgtgaatggtcacacggatgctcttagccggacgctcgataacgatgcgagatacagacgctttagccagttctttagtcaggaactgacgtactttaaaatcgctgtccaggttgtcagcgaattctttggtgttcgcgaaccaggtagagttccatggtttgacaatacccaggcgaataccattaggatgtactttctgacccattgctagtctccagagtctcagcgatcggacacaaccacagtgatgtggctggtgcgcttcaggatgcgatctgcacgacctttagcacgcggcataatgcgcttcatgctcgggccttcgtctacgaaaattttcgcaactttcagatcatcaatgtcagcgccatcgttgtgttcagcgttagcaatggcagattccagtaccttcttgaccagtacagcagcttttttgttggtgtaggtcagaatatccagggcctgcgacactttcttaccgcgaatcaggtcagctacaaggcgaaccttctgagcagaagaacgagcatggcgatgttgagctaaagtttccatctcttcctcctaccttatttcttcttcgcttttttatcagcagcgtggccgcgataagtacgagtcggtgcgaattcacccagtttgtgaccgaccatttcgtcggaaacaaatactggaacgtgctgacgaccattatggacagcgatggtcaaaccgatcatgttaggaaagatcgttgaacgacgggaccaagtgcgcaggggcttcttgtctccgctttccaccgctttctctaccttcttcagcaagtgcaggtcaataaaaggacctttcttgagagaacgtggcatggcttatcctctaaaattatttgctacggcgacgtacgatgaatttatcagtacgcttgttgctgcgggtcttcttacctttggtctgcaggccccacggggataccgggtgcttaccaaagttacgaccttcaccaccaccatgtgggtggtctactgggttcatcgcagtaccgcgaacggtaggacgaacaccacgccagcgtgcagcacctgctttacccagaacgcgcagcatatgctcagcattgccaacttcgcccagagtcgcgcggcagtctgcttcgactttacgcatttcaccagaacgcagacgcagggtgacataagcaccgtcacgagcaacgatctgaacgtaagtaccagcggaacgagccagctgaccgcctttacctggtttcatttctacgttatgaacggtagaaccaaccgggatattgcgcatcggcagggtgttgcctgctttgattgcagcatcaacgccagactgaatctggtcgccagctttcaggcctttcggggccaggatgtaacggcgctcgccgtctttgtacagaaccagcgcgatgttcgcggagcggttcggatcgtactcaagacgttcaacaactgccgggataccatctttgttgcgtttgaagtcaacaatacggtaagcctgcttgtggccaccaccgatatgacgggtggtgatacggccattgttgttacgaccaccggatttgctgtttttttccagcaacggagcaaaaggtttgcccttgtgcagctctgggttaaccactttaacgacgtggcgacgacccggagatgtcggtttacatttaacaactgccattgtattactcctccgacttactcagcgccgccaacgaagtccagattctggccttctttcagggtgacgtaagcttttttccagtcgctacgacgaccgatacgctgtccgtgacgtttaactttccctttaacaaccagggtgttaacgacttcgacttcgacttcaaacagtttctgcacagcagctttgatttctgctttggtcgcgtctttagcaactttgagaacgatggtgtttgttttttccatcgcagtagacgctttttcagaaacgtgcggtgcgcgcagcaccttcagcagacgttcttcacgaatcatgccagcatctcctcaacttgcttaacagcatcagcagtcattacgactttgtcgaaggcgatcaggctaaccgggtcgataccgttcgcatcacgtacgtcaaccttatgcaggttacgtgcggccaggaacaggttctcgtccagctcaccggtgatgatcagcacatcttccagagccatgtctttcagtttctgtgccagcagcttagttttcggcgcttcaacagagaacttctcgacaacgatcagacgatcctgacgtaccagttcggacagaatgcttttcagcgcgccgcggtacatcttcttgttaactttttgactgtggtcctgcggacgagcagcgaaggtcacgccaccggaacgccagatcgggctcttgatagaaccagaacgcgcacggccggtacctttctggcgccacggttttttaccggagccagtgatttcagcacgagtcttctgagcacgagtgccctgacgcgcaccggctgcataagcaacaacaacctggtgaaccagcgcttcgttgaaatcacgaccgaaggtagtttcggaaacagtcagcgcgctctgcgcgtctttcaatactaattccattgctatctcctcacgccttcacagctggtttaacgatcaggtcgctaccggtcgcacccgggacagcacctttaaccagcagcaggttgcgctcagcgtcaacacgtactacgtccaggctctgaacggttacacgctcattacccagctgacctgccattttcttgcctttgaacactttgcccggagtctggttctgaccgatagaacccggaacgcggtgggacaaggagttaccgtgagtagcgtcctgggtacggaagttccagcgcttaacggtaccagcaaaacctttacctttagaggtaccggttacgtcaacttttttaacgtcagcaaacagttcaacgctaatgttctgacctacggtgaattcttcgccgtcagccagacggaattcccacagaccacggccagcttcaacgccagctttagcgaagtgacccgcttccggcttggttacacggttagcttttttagcaccggtggtaacctggattgcgcggtagccatcgttagccaggtctttaacctgagtaacacggtttgcttcaacttcgattacggttactgggatagaaacgccatcttcagtgaagatgcgggtcatgcccacttttttaccgactaaaccaatcattgtttcaacctctcaatcgctcgatgacctgattaacccaggctgatctgcacgtctacaccggcagccagatccagacgcatcagagcatcaacggttttttcagttggctcaacgatgtcaaccagacgcttgtgagtgcgaatttcgtactggtcacgcgcgtctttgttgacgtgcggggagatcagaacggtaaagcgctctttgcgggtcggcagcgggatcggaccacggacttgcgcaccagtgcgcttagcagtctcgacgatttccgcggttgattgatcgatcagacgatgatcaaacgctttcaggcggatacggattctttggttctgcatgagaccagagctccaattattttatagacgaaatgattactcctcatacccattacgattgatgggagagtgtaaccgttcttacatagtcccccgattggggacattgtttgataacccaaatgcgattaccagggttcatattgaaccggccgtcaactttgacaggcccgcgcattatacgcaaattctggcgcgacgcaagtgctgtttagaaaatcatcaccaggatttgcgcgccttcgcattagcgcactgtacggggctgcaatgcggagtaagagggcggattgtgggctccattcccggaaaatgccttttgtgctgaacgggagaggatgagcatagtgacgcaatgttcatcgatcattgcggggtcaactatgctcgccgccctccccttcttgctgtgctatagcggtttgaccgtggcattatgccaccaggatctgcgccacggtctgttgcccgaccgttacacctgtcccctgctgtggagtggtttacttttttatctctgtctggcgccgcaccagctgcatgatgccgtctggggggcgatagcgggctatctctctttggctgcgatttactggctataccgcggtatccgcggctatgaagggttgggttatggagatataaaatatcttgccgccctcggcgcctggcatggctggcgattgctgccgcagttagtcctggttgcctcgctactcgccggcatagcgtgggcaggagcaggtttatacgccagttgcggcaggaagagcaaatggggaagaagcaacccgctgccgtttgggccattcctggcggccgcgggtttttggtgcgggtggcagacgctggctagtctgacactttgatctgcgactgcaggtaattttgcagaccgattttgccaatcaaatcgagttcggtttccagccagtcgatatggccttcttcatccgccaggatctcaatcatcatatcgcggctgacgtagtcatggacgctgtcggcataggcaatagcctcacgcaaattttgcgccccttccagctccagcctcaaatcggaccgcagcatctcttccacatcttcaccgatgccaagtttgccgagatcctgcagattagggataccttcgagaaaaagaatacgctcgatatacttatcggcgtgcttcatttcgtcgatggattcgtggtactcaatatcgttgaggcgcatcaggccccaatttttaaacattctcgcatgaagaaagtactgattaattgcgactagctcatttcccaataatttattgagataacttatgattttgacatcacctttcattatatagtccctccgcttccactcattgaagcgtagtccggcctatagggatgtcaaaagagaagcgtggacttcaggcgatttctttgaattccggcatggtggttaattcatcttccatcacttcacgcgcggcacgaacacacttaccgcattgatttcccacgggaacaaacttacgtaattgctgaaaagattgcggttgaaactggcgcacaacctgacgaatttttttatcgctgacgccattgcacaaacaaacgtacatagaaactcccgttcaatttatgcacaaatattaaatgagaatggttatgattacaatagaccatttgctcattatccgccgcaacgcacgatatgaatagccagcaaaaatccgtttttcgctgaatgacagacagcaaaaagggcgccgaaacgccctttttaattcaaagctaacgaattagcccagaactttagctacaacgcccgcgccaacggtacggccgccttcacggattgcgaaacgcagaccgtcgtccatcgcgatcgggtggatcagggtaacaaccattttgatgttgtcgcccggcattaccatctctacgccttccggcagttcgatggtgccagtcacgtcagtagtacggaagtagaactgcggacggtagcctttgaagaacggagtatgacggccgccttcgtctttggacaggatgtacacttcagattcgaacttggtgtgcgggttgatggtgcccggcttagccagtacctgaccacgttcgatttcttcacgtttgataccacgcagcagaacacctacgttctcaccagcacggccttcgtccagcagtttgcggaacatttcaacgccagtacaggtggttttcgcggtttctttgataccaacgatttcaacttcttcacctactttgatgataccgcgctctacacgaccggtaacaacggtaccacgaccagagatggagaatacgtcttcgatcggcagcaggaacggcttgtcaatcgcacgctctggttccgggatataggtatccaggtggccagccagttcgatgattttcgcttcccactctgcgtcgccttccagcgctttcagagcagaaccacgaacgatcggggtgtcgtcgcccgggaaatcgtactgagacagcagttcacgaacttccatctcaaccagttccagcagctcttcgtcatcaaccatgtcgcatttgttcaggaacacgatgatgtacggaacgcctacctgacgacccagcaggatgtgctcacgagtctgcggcatcgggccgtcagtcgcagcaacaaccaggatcgcgccgtccatctgcgcagcaccggtgatcatgtttttaacatagtcggcgtggcccgggcagtctacgtgcgcgtagtggcgagtcggggtgtcatattcaacgtgagaggtgttgatggtgataccacgagctttttcttccggcgcgttatcgatctggtcgaatgcgcgagcggaaccaccgtaggttttagccagaacggtagtgatggcagcagtcagggtagttttaccatggtcaacgtggccgatagtaccaacgttgacgtgcggttttgtacgttcaaatttttctttagacacggctatattccttactatagtgctctccccttcggagagagcacgggacttaggttttaatcctgtggattatttaccacgggcttcaataacggcctgagcaacgttgttcggcgcatcatcatacttcaggaattccatagtgtatgatgcacgacctttggtcagagaacgcagctgagttgcataaccgaacatttcggacagcggtacttcagcgtggatcttaacgccggttacttcggattcctgaccgcgcagcataccgcgacgacggctcaagtcaccgataacgtcaccagtgttctcttccggagtttctacttcaaccttcatgatcggctcaagcagaactggttttgctttcttaaagccttctttaaaggcaatagacgcagccagtttaaacgccagctcagaggagtcaacgtcgtggtaagaaccgaagtgcagacggatacccatatcaactaccgggtaacctgccagcggaccagctttcagctgttcctggatgcctttatcaacggccgggatgtattcgccaggaattacaccacctttgatgtcgttgatgaactcgtaacctttcgggttagagcccggctccagcgggtacatgtcgatcacaacgtgaccgtactgaccacgaccaccagactgcttggcgtgtttaccttcgatatcggtaactttcgcgcgaatcgcttcacggtaagcaacctgaggtttaccgacgttcgcttcaacgttgaattcacgcttcatacggtcaacgatgatgtcgaggtgcagctcacccataccggcgataatggtctggttagactcttcgtcagtccatacgcggaaagacgggtcttctttagccagacgacccagagccagacccattttttcctggtcagctttggttttcggctcaacggcgatggagattaccggctcagggaattccatacgctccagaatgatcggcgcatccgggtcacacagggtgtcaccagtagttacgtctttcagaccgatagcagcagcgatgtcgcccgcgcgaacttctttgatctcttcacgtttgttagcgtgcatctgaacgatacgaccgaaacgctcacgtgcagctttcacggagttcagtacggtatcaccagagttaaccacaccggagtacacgcggaagaaggtcaggttacccacgaacgggtcggtagcgattttgaacgccagtgcagagaacggctcgtcgtcgcttgcgtgacgctcagccggggtatctttaccgtcgtccaggataccgttgatcgcaggtacgtcaaccggggatggcaggtaatcaattaccgcatccagcatcgcctgaacgcctttgttcttgaacgcagaaccacaggttaccaggatgatttcgttgttcagaacgcgctgacgcagagcttttttgatctcttcttcagtcagttcttcaccacccaggtatttttccatcagctcttcagaagcttcagctgcggattcgatcaggttctggtgccattcatcagccaggtcctgcatgtcagccgggatatcttcgtattcgaaggttacgccctggtctgcatcgttccagttgatggctttcattttcaccaggtcaacaacgccggtgaaaccttcttcagcaccaattgccagctgcagcggaaccgggttcgcgcccagacgggttttgatctgaccaacaactttcaggaagttagcgcccatgcggtccattttgttaacgaacgcgatgcgcggaactttatatttgtttgcctgacgccatacggtttcagactgcggctgaacaccaccaactgcgcagtaaaccattaccgcaccatcaagaacacgcatggaacgttctacttcgatagtgaagtcaacgtgccccggggtgtcgatgatgtttacgcggtgcggttcatactgtttggccataccagaccagaatgcagtagtcgcagcggaagtgatggtgataccacgttcctgctcctgctccatccagtccatggtagcggcgccgtcatgaacttcaccgattttgtggtttacaccggtgtagaacagaatacgttcggtagtagtggttttaccggcgtcgatgtgcgcactgataccgatgttacggtagcgtgcgatgggtgttgtacgagccatttgattcctcgtttatttctttaggcgttcagttaagttatccagagcgggcgactcatctgaagcgcccgcctggtgactatgactccgaagggattaccaacggtagtgagcgaacgccttgttggcttcggccatacggtgaacgtcttcacgtttcttaactgcagtacctttgttgtctgcagcatcagtgagttcgttcgccaggcgcagagccatggatttatcaccgcgtttacgagcagcttcaacgatccaacgcattgccagggcattacgacggaccggacgaacttcaactggaacctgataagtagaaccacctacgcggcgggacttaacttcgacagtcgggcgcacgttttcgagcgcaacttcgaaggcttccagttcagatttaccagaacgctgagccagggtctccagcgcgctgtatacgatagtttctgcagtagattttttaccatctaccatcaggatattgacaaatttagccagcagttctgatccgaacttcggatccggcagaattttacgctgaccaatgacgcgacgacgtggcatggaaatactccgttgttaattcaggattgtccaaaactctaagagtttagtatgacattaagataaatcagtttggccttacttaacggagaaccattaagccttaggacgcttcacgccgtacttggagcgagcctgcttacggtctttaacgccggagcagtcaagcgcaccacgaacggtgtggtaacgaacacccggaaggtctttaacacgaccgccacggatcaggatcacggagtgctcctgcaggttgtgaccttcaccaccgatgtaggaggtgacttcgaaaccgttagtcagacgcacacggcaaactttacgcagtgcggagttcggtttcttaggagtggtggtatatacgcgagtacatacgccacgtttctgcgggcaggcttccagcgctggcacgttgctctttgcaactttgcgcgcgcgtggtttgcgtaccagctggttaattgttgccattaaatagctcctggttttagcttttgcttcgtaaacacgtaataaatcgcctcatatattatgaggacgcagaattttagggcggtgccgaaaaggtgtcaagaaatatacaacgatcccgccatcaccaggccaactgaccggcatgtttgactgtgagtctgacgaaatcagtatagctaaccctgccgacactgtccgcaatttgaccagccagcccgcgggcgtcaacgtcgtcttgcagcacgtatagggttatgggggcggattgcaggatctcaaggaagcgaccatcggcgatggccgcggtgacgccgtcagacagtagtaccagatcgtcgccgtgctccatcaaacgaagcatcgctgcgatgtcggcatgccagggggaaacactgagcgtatggagcatgggggcctcagaaacgcaaaatcacatcatattcatgcagacgggcgcgcagggcatccggcgccaggcattcgacatccaccacccacggggtcgcgggatccaggccgcgctctcgcgctgagtcggcgcacagccagcactggtcgatatcatatagcgacagcaatttaaaggtagcgatgtagtcgcgggccagcacagcgccaggccgctgttcgggtaacagctgaaacacgccgtcgcccacaaaaaacacgccaatatcgtcggtgagcgcggaggttgctaataaggcatcgaggccttccctgccggcggcgctgccgtgcggcgcagaggaaaatacaaaagccacacgtttcatcagaactgcaccatccgatcgcaagtaagcgccgcttccgctagcgcgccgagcccgctcaaggtaaaacccggctgcaaattgtggccaggcagagcgagctgttgcgcttcgcgttcgtccgttacgccacgacgcagggcggccgccacgcagatatgcagcgcgacgccgtgctcatcgtggagggattgccacccgcgcaccagatcgaactcatcgctggcgggcgccgtcaactggttagcgttaagcacgccttcgcgatagaaaaaaacgcacgccagctcatggccttcctgcagcacggcctgggcaaattgccaggcgctgctcgcctgctgcgtgccataggctgggccggtcaccgtgagggcaaaacgcattacttatccagcccctggaaatcgccgcttttgaactggcgaatatagaggtagacggtgtgcttggagatgttcagacgatcggctacctggttaatagcgtctttaatatcgaagatccctttctcgtagagattcagcacgatttgacggtttttcgcattgttagacacgctgcgatcggcattcacctcttcaatggtgaactccagcgtctgggcgaccagatcgtctaccgaagaagcaaagttcaccggcgagttcacttcaggcgtttctggcggaataaaggtgctcatgatctgggaaaacggcacatccagattcatgttgatacacagcagaccaatcacccggtgatcgcggttgcgaatggcaatcgtcaccgacttcatcagtacgccgcttttagcacgggtaaagtagcatttggaaacgctgctatcggcgcccgtcatatcgtgcagcatgcgcagcgcaagatcggtaatcggtgaaccgatttggcggccggtatgttcaccattggcgatacggatggcagagcatttcagatcctgcaaagaatgcagcacgatttcacagtgcgaaccgatgagcatcgccaacccgtccactaccgcttcataagatttgagaatatcgaaatcggtctggtcaaagggacgttgatccagcaggtcaagctcgctggtttcattggttaaaagcgacctggacatgaaaaaaagcactccttttcaggagcctgtcgttattgtcagggcaggctcatcatcattattaagctatctaaagtaatacagcgcctgaggatctttccagttttaattatatctgcgctcaataaaaaagccgccgcctctgacgagacggcggcctgaacctgattacttcttagcgtcagctttcgcgtccgcggctttcgcatcgcctgcggcttccggctgtgcatctgccttcggcgccggtttgatatccagcagttctacatcaaagaccagcgtagagttggccgggatgcccgggacgccagttttaccgtaggccaggtccggcggaataaccagcttgattttgccgcctttcttgatgttcttcaggccttcagtccagcccgggatcacgccgtcgagacggaaagagagcggctcgccgcgagtataagagttatcaaactctttaccgtcgatcagggtacctttgtagtttaccaccacggtatcgctgtctttcggcgcatcgccagcgccttctttctcgactttatacagcaggccagtttttgaggttttcacgcccttctctttggcaaagttgtcacggaaagctttgcctttagcttcgttctcagtggcgtctttttccattttctgctgagccgcggtcttcacgcgcgtttcaaaggcctgcagagtctgttcgatctcctggtcggacagtttgctcttatcggcaaacgcgtcctgtacgccggcgatcagctgggctttatccagcttaatgcccagcttctcttgttctttcagggagttttccatgtaacgccccagggacgcgcccagcgcataggccgatttctgatcgtcatttttaaatgccgatttactctcagccgccggggctgccttcgttgccgtatctgcagcgaaggtcagcggtgcattcagggcgacggccattgtggccgccagcagcgttactttaaacagtgatttcatccatttctccagggccggggcctctcgccccagggttatcgtaaaaagcaaaaaacgtactatagaacgttgccgttaaaatctacatacggacgttcctgaatatcgcctcttttaggactatttttgtatgaataagtttcctgtacggcgcagcgatgctgcgcgccaggggaaacttaagtagaatccgcccgcaggatcagactaaagaggttacccatgcacgatagcacattagaaacgcgccttgcggagctggaaagccggctggcgtttcaggaaatcaccatcgaagacctcaacaaaaccgtgaccgcccacgagatcgagatggcgaagatgcgggagcatatgcgtctgatgatcgagaagctgaaggcgacccaaccctcccatatcgcctcccaggcggaagaaacgccaccgccgcactattgaggcgtaaaaaaagcgggtttccccgcttttttgtcgtcttcgtgccgaagcgcaaagattagtggcagccgcagccaccgtggccgccgcagccgcctttaccatggtcgtgaccatgatcgtggccgtggccgccgcagcaaccgtcatgaccatggtcatgatcgtgatcgtggccatgcgcgccgtgcacgtgaccgtgctccagctcttccgcagtcgcttcgcggatggcgacgacttccacattaaacttcaggttctggccagccagcatgtggttgccatcaaccacaacgtggtcgtcttcaacttcagtgatttctactggtaccggaccctgatcggtttccgccaggaagcgcatgccaacctgcagttcatcaacgcccatgaagacgtctttcggtacacgctgcaccaggttttcgtcatactgaccgtaagcgtcgttagcgccgacggcaacgtcaaatttgtcgcccacttcgtggccatccagcgcgttttccaggccggaaatcagggagccgtgaccgtgcaggtaatccagcggcgcgcttaccggagactcatcaaccaacacaccgtcttctgtacgtacctgataggccaggctgaccaccaggtcttttgctactttcatgatatctcctgagatgggaagaatagtggcgcagattgtagcggaattctgctgccgtgtaccctttagcttaaaaaaagccgacggataacgctagtcgggatgaaaaatgccaatcacctgctcctctttgcgtacatgctcacgggcctctttatctgcctcacgcatctgatgaccgcacttaacgcactcaacaacatcgacattattctcacgccacattgccagcgaatcctgcgcctggcacgccggacatttcgccccggcaataaaacgtttacgcactgccataagatttacctttattcaaactcgtcccagccgtccagctgccggctctctttctgcatttcgcgctggaaaatctcttccagttcgcgccgggcctcccgcacgcgtgatatctgtaccgtatcagtatgcactggcattagctcgcgcagcattcgcatatcgaggcgtcggaagtgcagctgcgcgcgctgggcctggtgaggatgcatcccgagggtgatgagcgctttgcgccccagctccaacgcactggagaaagtttcacgagaaaactgcgtcacgccggcctgcagcagctcatgcgcctcaacgcgtccgcgagcgcgggccagaatatgcagatgtggaaagtgttgttgacacatttccaccagccgcatggtatcttctggctcattacaggtgatgacgatcgactgcgcctcttccgctcccgccgagcgcagcagctccagctgggtggcatcgccaaaatagactttatagccatagttgcgcatcagatttaccgcgctgatgtcccgctccagtaccgtaatacgcatcttattggccatcagcaggcgaccaatgacctgaccaaagcgaccaaacccgacaataatcacctgcggcttgtcatcctccacccacggcgcctcaccggtatcgtccgccggattcagccgtcgcgacaatagcttatctatccccttcatcagcagcggcgtcgtcatcatcgacaacgttaccgccaccagcagcagcgccatctggtcgtgctgaaacaatcgctgagaggcgggcagcgaaaagaggacaaacgcgaactcgccgccctggcttaatacgcccgcgaactgcatccgctcggaacttcgcaggccatagagacgggccagcagatagagcaccagcatttttaccgccaccagcaccgccacgctcaccgccacccacagcagatgggtatacagtacgccaaggttcagcgccatgccgacggaaataaagaacaacccgagcagcagccccttgaacggatcgatagcgatctccagttcgtggcgatactcactttccgccagcagcacgccggcaataaaggtgcccagcgccatcgacagccccagcgcctccataaacagggcagatccgaggaccaacagcagcgtggcggcagtgaacacctccctgacccccgagctggcgataaaacggaacaccggccgcaacagatagcgtccgccaatcagcatcccggcaaaggccaggaccttcatgccgaccgtcaaccagttcacatgctcatccgctgaaccggccagcaggggcaccagcgccagcgccgggatcaccgccagatcctgaaacagcagcaccgaaaagcctagctgtcccgcttcgctgcggctcattcccttctcacgcatcagctgcagcgccatggcggtggaagacatcgccaggccgatcccgccgaccaccgccgcctgccatgaaaacccggtcgtcatcagcaacccaccgaggatcgccgcgctgagcatcacctgcgccgcgccaacgccgaagatggagctccgcagtcgccatagcttggcgggattgagctccaggccgatgataaacatcagaaacactacgccgagctccgagaaatggagaatttcatccacatcgctgataaacccgagcccccacggaccaatggcgatcccggccagcagatagcccagcaccgcgccaatccccagtcttgcagccagagggacggcgatgacggccgcgaacaaaaacagcacccccgccagcagcaaatcagatcccgccatggacacctccggcggcgatggggttggccaaccagtcccggtaggccagggcgcggctgcgcagctcctctggctgctgcctccgggcccagtagacgataatggggctcatccagtgcatacggcacatgccggcggtcagttcaaaaggacgtaaaatatcgttcatcggatagcgattagcatcgcgacggtaggcgctctcaggctcgccggtagtgatcacgctgcgccagtactttcccgccagttcgttccctccggcgccgctggcgaagccgcggcttaacacacgatccagccactccttaagcagcgccggacagctccaggtatataaagggtgctggaaaacaatcacctcatgccggcgcagcaggtcctgttcgtaagcaatatcgataaaaaaatccggatagtgcgcgtagagatcgtgcacggtgacgttcggcaactgtaaggccggctctaataaaacccggttggccacggaatcctgagattctgggtgggcatacagcagcaacactttcgctgtctgagacatcattcccctcccgtaggtcttctggcggcctgcacagccccggcgttttgacacagccagaatgactttgtgtatcgtcttcgttttgggctaccatggcggcccggtgaagcgattcgcttccacactacattatcataatgacaaattaacatagtctgaacatacggcgccttatgattgttttctcctcgttacaaattcgtcgcggcgtacgcgtcctgctggacaacgccaccgctaccatcaatcctggccaaaaggtcggtctggtggggaaaaacggctgcgggaaatcgacgctgctatcgcttttgaaaaacgagataagcgctgacggcggcagtatgacctttcccggcaactggcagctggcctgggtgaatcaggaaaccccggcgctaccgcagccggcaatcgattatgtcattgacggcgatcgagagtatcgccagctggaggccgcgctccagcaggctaacgaacgcaatgacggtcatgctatcgccaccgtccacggtaagctggacgccatcgacgcctggactatccgttcgcgcgccgccagcctgctgcacggtctggggttcagcaatgaacagcttgagcggccggtcagcgatttttccggcggctggcgtatgcgccttaacctcgcccaggcgctgatctgccgctccgatctgctgctgctcgatgaaccgactaaccacctcgatctcgatgcggtgatttggctggagaagtggctgaagggctatacgggaacgctgatcctcatctcccacgatcgcgattttctcgatcctatcgtcgacaaaattatccatatcgaacagcagacaatgtttgagtacaccggcaactacagttcgtttgaagtgcagcgcgccacccgcctcgctcagcagcaggcgatgtacgaaagccagcagcagcgcgtcgcgcacctgcaaagctatatcgatcgcttccgtgccaaagccaccaaggctaagcaggcgcaaagccggatcaaaatgctggagcggatggagcttatcgctccggcgcacgtggataacccgttccacttcagcttccgccagccggagagcttgcctaacccgctgctgaagatggagaaagtcagcgccggctacggcgagcgtattattctcgactccatcaagcttaacctggtgccgggctcgcgtatcggcctgctgggccgcaacggcgccgggaagtcgacgctgattaagctcctggcaggcgagctccagcccgtaagcggcgagatcggcctcgcgaaaggcatcaagctcggctacttcgcccagcatcagctggaattcctgcgcgccgatgagtcgccgctgcagcacctggcgcgtctggcgccgcaggagctggagcagaagctgcgtgattatctcggcggctttggtttccagggcgataaggtgagcgaagaaacccgccgcttctccggtggagaaaaggcgcgcctggtactggccctgatcgtctggcagcgccctaacctgctgctgctcgatgaaccgaccaaccaccttgacctcgatatgcgtcaggccttaaccgaagcgctgatcgactttgaaggggcgctggtggtcgtatcgcacgatcgtcacctgatccgttccaccactgacgatctgtacctcgtccacgatggtaaagtcgagccgttcgacggcgatctggaagattatcagcagtggctcagcgactcgcaaaaacaggagtcccagagcggcgaggcgccaaaagagagcggcaatagcgcccaggcgcgcaaagatcagaagcgtcgggaagcggagctgcgcagccagacccaaccgctgcgcaaagagatcgcccgtctggaaaaagagatggacaagctcaacgcgcagttggccagtgcggaagaaaaacttggcgacagtgagctttatgacgcctcacgtaaagccgagctgaccgaatgcctgcagcagcaggccagcgcgaagtccgggctggaggagtgcgagatggcctggctggaggcccaggagcagctggagcgcatgcttcaggaaggctaaactcttcctcttcatcctgcctgcgcgtacgctgccgctggcagggtgggtttctgccctcttcatggcctggccatcagcgacatcaatgatttgtttttgctgtaagctggcgtcactggccgcaagaccacatattggctaaccccctgcatgccctgcgcggtatagtcatcatcacgtttattaattgttctggtgctatggttgaaatcatccccacagacatgacgccccccgaaaacgattcgcgtgagttccatccgatgcgcggcgtgggcaatcgtcatctgcaaaccatgctgccgcggctgattcgccgtaaattgcgctttaccccgcactggcagcgccttgagctgccggacggcgattttgtcgatctggcctggagcgaagacccgcaccaggcgcgccataagccgcgcctcgtcgtttttcacggcctggaaggcagtctgcacagcccgtacgcccatggtctgatccacgcggcgatgcagcgcggctggctgggcgtggtgatgcatttccgcggctgcagcggcgaacctaaccgcaatcaccgcatctatcactccggcgaaacggaagatggcacctggtttttgcactggctgaagcgcgagtttggtcccgcgccgaccgcggccgtcggctattcgctgggcggcaatatgctgggctgcctgctggcagaagaaggcgaccgctgcccgctggatgcggcggtgatcgtctccgcgcctttcatgctcgaagcctgcagctatcatatggataagggcttctcgcgggtttatcagcgctatctgctcaatctgttaaaagccaacgcttcacgcaagctgaaagcgtacccgggctcgctgcccgtcgatttacgccagctcaaagggatgcgccgcatccgggaatttgacgatatgatcaccgccaaaatccatggctttgccgatgcgctggattattaccggcaatgcagcgccatgccgcggctcagcgatatcactaagccgacgctcatcattcacgcgaaagacgatccgtttatggatcaccactctattccgccgcaggagcaactgccagcgaacgtagagtatcaattgaccgagcaaggcggccacgttggctttgtcagcggcactctgcgtaaaccggagatgtggctggaaagacgcattcccgactggttaaaccgctggctggaggttcccgtatgattattccctggcaggatctggatcccgaaacgctggataacctgattgaaagctttgtgttacgtgaaggcaccgattatggtgaacatgaacgttcacttgccgataaagtcgccgatgtaaaacagcagctgaaacgcggagaggcggtccttgtgtggtcggaagtgcatgagacggtcaatattatgccgcgcgcgctgtttaacggctaaggcgacgccactacatcgtttaaccagggagttgttatgtctgccaaacatccggtgatcgccgtcacgggctccagcggcgcgggcactaccaccaccagccttgcctttcgcaaaatcttcgcgcagctaaacctgcacgccgcggaggtggaaggcgatagctttcatcgctacacccgcccggaaatggacatggcgatccgtaaggcgcgggatcagggtaaacatatcagctactttggcccggaggcgaacgacttcggcctgctggagcagacctttgtcgactatggtcgccacggcaaaggtcagtcgcggaaatacctccacacctatgacgaagccgtgccgtggaatcaggtgccggggacctttaccccctggcagccgctgccggagccgacagacgtgctgttctatgaggggctgcacggcggggttgtcacgccgcagcatgatgtcgccagccatgtcgacctgctggtcggggtggtgcctatcgttaacctcgagtggatccaaaagcttattcgcgacaccagcgaacgcggccactcccgggaggcggtgatggactcggtcgtccgctcgatggaagattacatcaacttcattaccccgcaattttctcgcacccatatcaactttcagcgcgtgccgacggtggacacctccaacccgtttgccgccaaagcgatcccctcgctggacgagagctttgtggtgatccatttccgcaatctgcagaatatcgatttcccctggctgttggcgatgctgcagggctcgtttatctcgcacatgaacaccctggtggtgccgggcggtaaaatggggctggcgatggagcttatcatgacgccgctggtcgagcgcctgatggaaggccgtaagataggctaaccaaaaaaccccggcctggccggggttgagattcgatacaacggcaggcgaagactacgcctcgatcacttcataggagtgagtgatgttcaccgctttttccagcatcagcgccaccgagcagtatttctctgccgacaggtccaccgcccgggagaccgcggcatctttcagcgccttgccggtgacaataaaatgcagattaatatgcgtgaacagacgcggagcctcttcgcgacgctcggaggtcagcttcacttcgcaattggtcacgtcgtgacgacctttttgcagaatggagaccacatcgatcgcactgcaaccgcccgccgccatcagcaccatctccatcgggctgggagccttatccccggagttgccatccatcagaatctggtgtcccgatgcggactccccgataaaggttaacccttctacccatttcacacgcgcttgcataaaatttaactccagtatcgcaatattcctgtcagattacgcgcacataacaattctcgcaacggaaggcgacctgcgtcatgctgaagcgagacaccaggagacatgcggcgaaagctatgctaaaacagtctggatgctacagtaatacattgatgtactgcatgtatgcagaggagttcacattacgggctgtcgaaaaatcatcagccagcttcccaggtatagggaaacaatacgattgcatgcccggacgccgtgtagtgtcggcgcccggagatagcttataacagaggataaccgcgcatggtgcttggcaaaccgcaaacagaccctacccttgaatggttcttgtctcattgccacattcataagtacccatcaaagagcacgctgatccaccagggtgaaaaagcagaaacgctgtactacatcgttaaaggctccgtggctgtactcatcaaggatgaagaaggtaaagagatgatcctctcctacctcaaccagggcgatttcatcggtgaattaggcctgtttgaagagggtcaggagcgtagcgcctgggtacgggcgaaaaccgcatgtgaagtggccgaaatctcttataagaaattccgtcagctgatccaggtgaacccggacattctgatgcgtctctcttcgcaaatggctcgccgtctgcaggtcacgtctgagaaagtgggcaacctggccttcctcgacgtgacgggccgtatcgcccagacgctgctgaacctggcgaagcaaccggatgccatgacccacccggacggtatgcaaattaaaattacccgccaggaaattggtcagatcgtcggctgctctcgtgaaaccgttggtcgtattttgaaaatgctggaagatcagaacctgatttccgcgcacggtaaaaccatcgtcgtctacggcacccgttaagttgctaagcggcgtattgctcccgcagtacgccgtttttgtttttccctcatgtggcgcaggctgatttaccacccggaagtcaactatgcactgcggcaaacgctggtgctgtgtctgcccgtggccatcggtcttctgctcggccatctccagcaggggctgttattttccttagtccccgcctgctgcaacattgccggtcttgataccccgcataagcgctttttcaaacgcctgattatcggcggctgcctgtttgccggatgcagtctggtggtgcagttgctgcttgcccaggcgatacccctgccgtttattctcagcggcctggcgctcttgctcggcgttaccgcggagatcagttcgctgcacgcgcggctgctgcccgcgtcgctgatcgccgccatctttaccctgagcctggcgggcaatatgcccatctgggagccgctgctgatctacgccttcggcacgctgtggtacggcgtgtttaactggttctggttctggctgtggcgcgaacagccgctacgggagtcgcttagcctgctttaccgggagctggcggactactgtgaagccaaatacagcctgctgacccagcataccgatccctcgaccgccctgccgccgctgctcacccgccagcagaaagtggtcgatctgattactcagtgctatcagcagatgcatatgctggccgctaaccaacgcaacgatcataagcgcctgctgcgggcgtttcagatggggctggatctgcaggagcatatttcggtcagcctgcatcagccggaagaggtgcaaaagctggtggaacgcagccatgccgaagcggtgatccgctggaacgcgcagaccgtcgccgctcgcctgcgcgtgctggcggatgacatgctctatcatcgctttccaaagcgctttcagatggataaacagatcgaggctctggaaaagatcgccagacaacatccggataacccggtcggccacttctgcgcctggcacttcagccgcatcgcccgggtgctgcatacccagcgcccgctgtatgcccgggacctgatggccgacaaagagcgtcgtttaccgctattgcctgcgctaaagaactacctgtcgctaaaatcgcccgcgctgcgcaatgccgcccgcatcagcgtgatgctgagcgtcgccagcctgatgggcaacgccctgcacttgcctaagccctactggatcctgatgacggtgcttttcgtcacccagaacggctatggcgccacccgggtgcgtattgttcaccgggcggcggggacgctcgccggcctgacgatcgccgggctgaccttgcattttcacgttccggagagctacaccctgagcgggatgctgctgattaccctgctcagctatctgatcattcgcaaacactatggctgggcgatggttgggtttacggtgacggcggtatataccctgcagctgctgacgcttaacggcgaacagtttattatcgcccggctgatcgacacccttatcggctgcctgatcgccttcggcgggatggtctggctgtggccgcagtggcagagcggcctgctgaaaaaaaatgcccacgatgcgctggaggccgaccagcaggcgattcgcctgatcctcagcgccgatccaaaagcccccgcgctggcctatcaacgcatgcgcgtcaaccaggcgcacaacgcgctctacaactccctgaatcaggcgatgcaggaacccgggtttaatacccactatctggaagatatgaagctgtgggtgacgcacagccagtttatcgtcgaacacatcaacgctatgaccaccctggcccgggagcatacgatgctgaccccggatcttgcccagcgctatctcgaatcctgtgagattgcgctgcagcgctgccagcagcggctggacagcgatggtcccggcagcgcaggggatgccaatattatggagtcgccggaaagcgaggcgccgatcggtccgttaagcaccctggagcagcatctgcaacgcattctgggccatctgaacaccatgcacaccatttcgtcagtggcatggcgtcagcggccgcaccatggcatctggctgcggaagatcaaccgttaatcacctttgccaccgcctgggcaaagcgcgccatcccttcagtaatatcctgctcgtcgatgatcagcgagggaacaaaacgcatcacgtccggcccggcgttgagcaccatgacgccggcgtcggccgcggcatagaggaaatcacgcgcgcggcctttgtgctgcggcttgagttccgcgccgatcagcaggcccatcccgcgtatatcactgaacagatcaaactcggcatccagccgctgcaggtgtttgacgaacagttcgcgcttcgcgctcacgccatccagcaccgccggggtattgatcagatcgaaggcggcgttggcgaccgcgcaggccagcgggttgccgccgtaggttgagccatgggagcccgcatggaaggcgctggcgatctcgtgggtggtcagcatggcgctgaccgggaagccgccgcccagcgctttggcgctggtcagaatatccggggtcacgccgtagtgcatataggcgaacagcgatccggtacgccccataccacactgtacttcatcaaagacgagcagcgcctggtgctgatcgcacagctcgcgcagtccctgcaggaaagccggcgtggccgccgtcacgccgccttcgccctgaatcggctccaccaccaccgcgcaggtgtggtcatccatcaccgcttttaccgcctgcagatcgttgaagggaacatggacaatatccgccggttttgggccgaaaccatcggaatacttcggctgaccaccgacggaaacggtaaacagggagcggccatgaaaggcattatggaaggcgatgattttggttttatacgggctatggcgggtcaccgcatagtgacgcgccagcttaaaggccgtttcattggcttcggtgccggagttcataaacaccacgcgctcggcgaaggtagcctcgacaagtttacgtcccagacgcagcgccggctcattggtaaagacgttgctggtgtgccacagcgtttcgccctgctgatgcagcgccgccaccagcgccggatggcaatggccaagcgccgtcaccgcgataccgccggcgaaatcgatatactctttcccctgctgatcccagacgcggctgcctttccccttcaccgggatgaattctgccggtgcataaattggcaaaataacttcatcgaatgtggcgcgggtgattgccggttgttcagttgccatgtcttgcccatccctcttcgttacgcagatgcgattatgataatctaatcacaaaatatgcataaaaaatcagtcaatagcaactgaaaatcaccgtttcaaaaagttggccagcaattgatggccctgctcgctgaggatgctttccggatgaaactgcacgccctcgagatcccattcgcggtgacggatccccataatctcaccgctggcgctgcgggcagtgacgttaaactcggacgggagcgtcggcgggtcaatcaccagcgagtgatagcgggtcaccgtcaggggaatattcagcccctgaaacaccccttcgccgttatgctcgataagcgaggttttgccatgcatcacctgggccgcccgcacgatagtcgcgccaaacgcctgggcgatcgcctggtgcccgagacagacgcccagcagcggcgttttccccgcatagtggcggataaccgcgagggaaatccccgcctcatccggcgtgcaggggcctggcgagatcacgattttctccggcgccagcgccgctatctcctccagcgtcaacgcatcgttgcgcctgaccagcacttccgcccccagttcgcagaagtactgatacagattccaggtgaaagagtcatagttatcgataagcaggatcatagcggctccggaacaatcaaaaccgggctattctactcagattcccgcgcttcgcttaccactttgcgaaagatcgccaccagcggggccagatcgcccatcgcgctctgctggcaggccgcactccagccggcggggtcaacgtcacgccagttaagaaggtagccggcatgtatcgccagctgttcaaagaaaatacgctgggtcaggccattgccaagacgaaaagggtgcagcacattaatttcaccatagaaccagctcaggcgttcgatgaaggtatcgcgcggcaggccattgagataatcctcctgctcaagggcctgcatcagggcattcccctcctcctcgatccgggcaaagtggcagaacggcgtatcgcccaggtagaggttcacttcacgcaagcggcccgcccagtcaaacagatcctgatacaactgatgatgaatagcgcacagatagggtaagccgcgcacccgcgggcccagcggcagagtggccgcccgcagcgctgtcatctcaaaggcggcctgctgcagatttttagcctggcggatgccgagacggttgcgcagcacgttcagcgccggataaaggtaaggatcgcgttcatcgccgaatttatcgctcatactccctccgcaacgtcgccagacgcgccagcgcctcttcggcagtcagcgtaaccagcggcaccgtcacgccttcaaggcgacggctggcctgaaaattggtattgcgtgtctgttcccagagtcgggatttttgcttatcggtgagtggacgcatcgtcgccccccttatcgtcccctgtgtgccacaagtataagcagcaatttcaggttatgccgggaggcgaccgggcgcggcgatagaccaccgcgccgcgggaggattagggcagcactttcgcagagaggataacgaccggtttggtcggcacattctggtacggaccaacgttatgggtctggacctgggagatcttatccgcaacatccatccccttcaccactttgccgaataccgcatagccaaagtcgcgctggccatggtcgaggaaggcgttatccgccacgttgatgaagaactgactggtggcgctatcctgatcggcggtacgcgccatcgcgatggtaccgcgggtgttgcgcaggccgttgtctgcttcattcttgatcggcgggttaggctgcttctgctgcatctgttcgttaaagccgccgccctgcaccatgaatcccgggatcacgcggtgaaaggtggtgttgttgtagaagccgctgttgacgtacttcaggaagttatccacggaaatcggggctttctggctgtttaactcaagctcaatgttacctgccgaagtggtcagcagcacatgcggatcgccctttgccgccatggccggggagaacgctgaaatagcgaaaacggcagccatcgccgccagtgttgatttgagcatggaaattccttaacggagcagaataaaagcgagtgccttgattctaaagagcctttgcatcctgggccagccttttaccaaattttacttagctgtaataattgtaaccgcgcaaacgatctcctttgcagcgaacaagcgtgatacagatcacattaaaacatgcaaaagataacccatttcacaataaacatttaattacatcacctgaacgaataaaatctgtccgcccggcgcagcgtcaacgcgctttacctttctattcacaggccagtcatgactaacagcaaccgtattaagctcacatggatcagcttcttctcctacgccctgaccggcgcgttggtgatcgtcaccgggatggtgatgggtaacattgcggattatttccatctgcccgtttccagtatgagcaacacctttacctttctgaacgccggtattcttatctccatcttcctcaatgcctggctgatggaaatcgtgccgctgaaaactcaactgcgctttggctttattttgatggtgctggcggtggccggcctgatgctcagccacagcctggcgctgttctccgcgtcaatgttcgttcttggcctggtgagcgggatcaccatgtcgatcgggaccttcctgatcacccatatgtatgaaggccgtcagcgcggggcgcgtctgctgtttaccgactccttctttagcatggcgggcatgattttcccgatggtcgccgccgtcctgctggcgcgcagcatcgagtggtactgggtctacgcctgtattggtctggtatatgtcgctattttcgtcctgactttcggctgtgattttccggtgctgggcaaaaaagcccagagcgaaaacagccagccggtggtgaaagagaagtggggcatcggcgtactgttcctctccgttgcggcgctgtgctacatcctcggtcagctgggctttatctcctgggtaccggaatatgcgaagagcctgggcatgagcctcggcgacgccggtaaactggtgagcgatttctggatgtcctacatgatcggcatgtggtcattcagcttcatcctgcgcttcttcgacctgcagcgtatcttaaccgtcctcgccgggctcgcgacggtgctgatgtacctgtttatcaatggttcgccggagcatatgccgtggtttattctgaccctgggcttcttctccagcgccatttacacctcgatcattacgctcggttcgcagcagacgcgggtcgcttcgccgaagctggtgaactttatcctcacctgcggcaccatcggcaccatgctcactttcgtggtcaccggcccgattgtggcggccagcggtcccctggccgcgctgcacaccgctaacggcctctatgccgtggtattcgtaatgtgctttatcctcggcttcgtctcccgtcatcgccagaacaacgctcaggcggcgtctcactaagccttcggcccctttgcatccgcaagggggctgttcctcataaaagaaagctcctcgccaccgcggtcagtttggatccagctttgcgccggctgggtggtcgcgatcacccttccctggcgaattgaccagcgcaccggcacttggcagcggacggcctcaaagccattctccgccgggagaatgatcaggttagccgggttgccgctgacaatgccgtaatcctcgaggccaaacgtacgggcgctgttgtcggtgataagctgcaggccgtcgttgatctgctggtagcccatcagctggcaaacatggagccccatatgcaggacctgcagcatattgccggtccccagcgggtaccacgggtcaaagacgtcatcatgaccaaagcaaacgttgatccccgccgccaacagctccttcacccgggtaatgccccgtcgcttcgggtagtcgtcaaaccggccctgcagatgaatattcaccagcggattggcgacaaagttgatgccggagagcttaagcaagcggaacagacgcgaggtataagcgccattataggagtgcatagcggtggtatggctggccgttacccgcggccctatccccgctttcagcgccagcgcggcaacggtttcaacaaagcgcgactgctcatcgtcaatttcatcgcagtgaatatccagtgggcggtcatattgctgcgccagacggaaggcgatatgcagcgattccacaccatattcacgggtgaactcaaaatgcgggatcgccccgacgacgtccgcccccagcttgagggcctcctccagcagcgcctcgccgttggggtaagagaggatcccctcctgtggaaaagcgacaatctgtaactcgacccatggcgccacctcctgtttgacctccagcatcgccttcagcgccgttaacgtgggatcggaaacatcgacatgagtgcggacaaactgcacgccattggcgatctgccacttcagggttttccacgcccgggctttgacgtcctcatggctgagcagcgctttccgctccgcccagcgctcaatcccctcgaacagagtaccggactgattccagttcggctcgccggccgtctgggtggtatccagatggatatgcggctcgataaaaggcgggatcgctagcccgccgcgagcgttcaatacctcgtagctttcatcgtgcgcctcccccatcggcgtgatctcgccaaagcggcccttatcaatggctatttgccacaggccgtcgcggtctgccaggcgtacgttctgaatcaaccaaagcggcgctgctgtcatatcaccctctctattcaatacggcttgttttctgtctaaccccaatcgcggcttacccaattcttgtacacaaaatcagcaaaaaggaaaagtcagcgttttccatgacttataaaaatactgacaaatcaaacgcatacccattaagtggtaggtgaagttgtcattgatttgcatcaataagcctgatggctgaatcgttaaggtaggcggtaatagaaaagaaatcgaggcaaaaatgagcaaagtcagaatcgctattatcggtaacggcatggttggccatcgctttatcgaagagcttctcgataaggcgcctgccggacagttcgacattaccgtgttctgtgaagaaccgcgtatcgcctacgaccgcgtccacctgtcgtcttatttctcccatcacactgcggaagaactgtcgctggtacgcgaaggtttctatgagaaacacggcgtcaaggtgctggtcggcgaacgggcgatcaccatcaaccgccaggagaaagtgatccactccagcgccgggcgtaccgtgttctacgacaagctgattatggcgaccggctcatacccgtggatcccgccgattaaaggcgcggaaacccaggattgcttcgtctatcgcactattgaagatcttaacgccatcgaatcctgcgcccgccgcagcaaacgcggcgcggtagtcggcggcggcctgctcggcctggaagcggccggcgcgttgaaaaacctcggcgtggaaacccatgttatcgaattcgcgccgatgctgatggccgaacagctcgaccagatgggcggcgagcagttgcggcgcaaaatcgaaagcatgggcgtgaaagttcacaccagcaaaaacaccaaagagattgttcagcagggcaccgaggcgcgcaaaaccatgcacttcgccgacggtagcgagctgcaggtcgatttcatcgtcttctcaaccgggatccgcccgcgcgataagctggccacccagtgcgggctggcggtcgcccagcgcggcggcatcatggtcaacgatagctgccagacctccgatccggatatctatgccatcggggaatgcgccagctggaacaaccgcgtctacggtctggtcgcccccggctataaaatggcccaggtggccgtcgaccatctcctcggcagtgaaaatagcttcaccggcgccgacctcagcgccaagctgaagctgttgggtgtggacgtgggcgggatcggcgatgcccacggccgcacgccgggcgcccgtagctacgtctatctcgacgaaagcaaagaagtttataagcgcctgatcgtcagcgccgacaacaaaacgctgctcggcgcggtgctggtcggcgacaccagcgactacggcaatctgctgcagctggtgctcaacgccatcgagctgccggaaaacccggattcgctgatcctcccggcccacgccggcagcggcaagccatcgatcggcgtggataaactgccggacagcgcgcagatctgctcctgctttgacgtcagcaaaggcgacctgatcgccgctatcaacaaaggctgccacaccgtggcggcgctgaaagcggaaaccaaagccgggaccggctgcgggggctgtattccgctggtcactcaggtgctcaacgccgagctggcgaaacagggcatcgaggtcaacaacaatctgtgcgaacacttcgcctactcccgtcaggagctgttccacctgatccgcgtggaaggcattaaaaccttcgacgagctgctggaaaaacacggtcagggctacggctgtgaagtctgtaagccgaccgtcggttccctgctggcctcctgctggaatgagtacatcctcaagccgcagcacacgccgctgcaggacagcaacgacaacttcctcgccaacattcagaaagatggtacctattcggtgatcccgcgctcagctggcggcgaaatcacgccggaagggctggtcgccgtgggccgcatcgcgcgtgaattcaatctgtacaccaaaatcaccggctctcagcgcatcggcctgtttggcgcgcagaaagacgacctgccggagatctggcggcagctgattgaagcgggattcgaaaccggccacgcctacgccaaagcgctgcgaatggcgaaaacctgcgtcggcagcacctggtgccgctacggcgttggcgacagcgtcggcttcggcgtagaactggaaaaccgctataaaggcatccgcaccccgcacaaaatgaagttcggcgtctccggctgcacccgtgaatgcgcggaagcgcagggtaaagacgttgggatcatcgccaccgagaaaggctggaacctgtacgtgtgcggtaacggcgggatgaaaccgcgtcacgccgatctactggccgcggacctcgatcgcgatacgctcatcaaatatctcgaccgctttatgatgttctacatccgcaccgccgataagctgacccgcactgccccgtggctggacaatatggaaggcggtatcgactatctgcgcagcgtcatcatcgatgacaagctcggtctgaacgaccatctggaagaagagctggctcgcctgcgcgccgccttcgcctgcgagtggaccgagaccgtcaacaacccggcggcgcagacccgcttcaaacactttatcaacagcgaccagcgcgacccgaacgttcaggtggtgcccgaacgtgaccagcaccgcccggccacgccgtatgagcgtatcccggttactctggtggaggaaaaagcatgagccagtgggtaaatatctgcagcatcgacgacatcctgccggccaccggcgtctgcgccctgctcggtcagcagcaggtggcgatcttccgtccctaccatgacgacagggtattcgccatcagcaacattgatccgttcttcaacgccagcgtactgtctcgcgggattatcgccgagcatgacggcgcgctatgggtcgccagcccgctgaaaaaacagcgcttccgcctgagcgacggcctgtgcatggaagatgccagccactctatcgcccgcttcgacgcccgcgtgaaagacggacacgttcagcttaaagcgtaagtccttctccctcccccggccacgggggagatataagtaacagttctgaccgacagcgcatgagtgcgggatatgtcgcatgttttgtattacctttgctgctattctacgaccactcgttttctaccccttatttttatgaggttattctgtggatcacttacccatattctgccagttgcgccagcgcgattgtttactggttggcggcggggatgtcgccgaacgcaaagcccgtctgctgctggatgctggcgctaacgtcacggtcaatgcgctcgacttcacgccccagtttcaggtgtgggctgattcacagatgctaactctggtgcagggggagtttatcccctcgctgctggataactgctggctggccatcgccgctactgatgatgagacggtcaaccagcaggttagcgaggcggccgaagcgcggcgtatcttctgtaacgtggtggatgccccgcgccaggccagctttatcatgccgtcgataatcgatcgctcgccgctgatggtcgccgtctcctcgggcgggacatcaccggttctggcgcgcctgctgcgcgagaaactggagtcaattctgcccctgcatctcggccagctggcccgctatgccggccatctgcgcgcgcgggttaagcagcagtttgccaccgtaggcgagcgtcgccgcttctgggagaagctgtttgttaacgaccgtctggcgcagtcgctggctaatgacgatcggcaggcagtcgcggataccactgagcagttgctgacggagccgttggagcatcgcggcgaggtggtgctggttggcgccggccccggtgacgccgggctgctcacgctcaaaggcctgcagcagatccagcaggctgacgtggtggtctatgatcggctggtctccgatgacatcatgaatctggtgcgccgcgatgccgatcgggtgttcgtcggcaagcgctcaggctaccactgcgtcccgcaggaggagatcaaccagatcctgctgcgcgaagcgcaaaaaggaagacgcgtggtccggctgaaaggcggcgatccctttatctttggccgcggaggggaagagctggagacgctttgcgaggcgggcatccccttctccgttgtgcctggcattaccgccgcctccggctgctccgcttattcggggatccctttgacccaccgcgatttcgcccagggcgtccgcctggtcactggccacctgaaaaccggcggcgagctggactgggcgaacctggcggtggagaagcaaaccctggtgttctacatgggtctgaaccaggcgccggcgatccgcgagaagcttatcgctcacggcatggctgaagatatgcccgccgccatcgtcgagaacggcaccgctgtgacgcaaaaagtggtcagcggcaccttaggacaactggatattctggcgcagcagatggccagcccggcgctgatcatcgtcggccgcgtggtcggtctgcgggataaactgaactggttttcgaaccattaaccttgcctcccataaagtgacaggcataaaaaagggcgggatagcatcccgcccttttagctgttgcgtcgcttacggcttggcgacaaagccaatcgcttcgtataccgctttcagggtttgagaagcccgcgcgctggccttttccgcaccgtctttcatcacctgattgagaaacgcttcgtcgttacggaaacggtgatagcgctcctgcaggtcaatcagcatgcccgataccgcttcggcgacttcgcctttcaggtggccatacattttgccttcaaaatgctgttccagctcaggaatagttttcccggtaaccgcggagaggatatccagcaggttggagacgcccgctttctctttcagatcgtaacgcactaccggcggctcgtcggagtcggtgaccgcacgtttaatcttcttgaccaccgatttcggatcttccagcaggccgatgacgttgttgcggttgtcgtcggacttggacatctttttcgtcggctccagcagcgacatcacgcgcgcgccggatttagggataaacggctcaggcactttaaaaatatcgccgtagatggcgttaaaacgctgggcgatatcgcggcttagctcaaggtgctgtttctgatcttcgcccaccggaacctggttggtctggtacagcagaatgtcagcggccatcagtaccggataatcaaacagaccggcgttgatgttctccgcgtagcgcgctgacttgtctttaaactgagtcatgcggctcagttcgccgaaataggtgtagcagttcagcgcccagcctagctgggcatgttccggcacgtgcgactgcacgaagatagtgcttttctgcgggtcgatgccgcaggccagatacagcgccagggtgtccagcgtcgccttgcgcagctgctgcggatcctggcgcacggtgatggcgtgctggtccacgatgcaatagatgcagtggtaatcgtcctgcatgtttacccactgacgcagcgcacccatatagttgccaatggtcagttcacctgagggctgtgcgccactaaaaacgatgggcttagtcatgtttcaattcctgagtttcactgtgcggtaacccgagagcgggtaagagttcgttaaactggtcgaagagatagtccggctcgctcagcgcaagcggttcaccatagttataaccgtaggtcagaccaacagagcagcagcctgccgctttggccgcctgaatatcattgcgcgaatcgccgacaaacagcagctcggctggagccagagagagcttttccgccaccagcagcagcggttccggatgcggctttttattctgcacgtcatcgccgccaatcaccacggtaaaatatttcgcaatatcgagcgcgtccaacagcggggcgacaaacggcgtcggcttattggtaaccagcgccagcggcaggcctttggcatgcagcgcgccgagcgtatcggccaccgccgggaacaggaaactgccctcttccgccgcttcggcgtaatagcggtcaaacagtttacgcaaaatgcgcagctgctcgtcttgcggaatatcatgatcgtcgacagaaggcttacccatcgccgcacgtaacgttgctcgctcctgacgagcccaggtaagcgcccgctccatcaggacatcggcgccgttaccgatccaggtgataacgcgttcttctcccgccaccggcagctccagggcgtacagggcgttatcaaccgccgaggttagacccggcgcgctgtccaccagcgtgccgtcgagatcaaatgcgatgccgcggatcgcctgtaatttatccatgactcaccttcgctaattctatacgcatttgatcaatgacttgcttgtagtccggctgaccgaagatcgccgaaccggcaacaaacatatccgcacccgccgcggcgatttcgccgatattgctggctttcacgccgccatccacttcgaggcggatgtcgtagccggacgcatcgatgcgctggcgcacttcacgcagtttatccagcgtctggggaataaaggactggccgccaaagcccgggttaaccgacatcagcaggatcacgtccagcttatccatcacgtaatcgaggtagctcagcggcgtcgccgggttaaacaccaggcccgctttacagccgtgctctttgataagctgcaggctgcgatcgacgtgttcggaggcttccggatggaaggtgataatgctggcgccggcttcggcaaaatcaggaatgatgcggtcgaccggcttcaccatcaggtgaacgtcgattggcgcggtaataccgtaattacgcagtgacttcagcaccatcgggccaatcgtcaggtttggcacgtagtggttgtccataacgtcgaagtgcacgacatccgcacccgccgccagcgccttcgcggtatcctcacccagacgggcaaaatcagccgacagaatcgaaggggcaatcaaatactgcttcatccgcatctccttgaaatttatttggtcttaggcggacggtagagcgctaatagctcgtccacctttttacgcgtaccaccgttgctgctgatgctgcgccgcaccttcacaatatgcgtttctgccgcgtttttataccattcctgcgtcagcggcgtgcggtggttggaaatcagcaccgggatgcgctttttcatcagcgattccgccttttgcgccagcagtacctgttgttccaggttgaaactgttggtgtggtaggcggtaaagttcgccgtcgccgttagcggcgcatagggcggatcgcaatacaccactgtgcggctatccgcacgttgcatgcactcttcgtaagattcgcagtaaaactcggcgttttgcgccttctcggcgaaatgatagagctcagcttcggggaaatagggctttttataacggccaaacggcacattgaactcgccgcgcagattgtagcggcacaggccgttgtagccgtgacggttcaaatacaggaacagcaccgcgcgacgcagcggatcctggctttggttaaattcatcacgatacaggtagtagcgctcagcgacgttattttccggggtaaacatctcacgggcggcggcgacgtattcgtcggtgcgcagtttgacgatgttgtacaggccgattaagtcactgttgatatccgcgaggatataacgagaaaagtcggtattaagaaataccgacccggcgcccacaaagggctcgatcaagcactcgccttccggcaaatgctttttaatatcgtcaagcagggggaactttccccctgcccacttcagaaaagcgcgattctttttcatgctgcctaactaattacacgttctccggctgtggagaaagctccgacagcatcctgcgcttaagactaccccacggcattatttcaggtcagcctgaacctgatgcagcggttttgcccatggatttttcgcctgcacgtccgccggcagcgaggtgacagcacgtttcgcttcatctttcgatgcatagataccgctcaccagcacgtaccatggttggccgttacgcgacgtttcatagacaacatatttatccagcttctctttcttcgcccagttgttgaggttgtcgtagttagaggagctgctgagctgcagagtatagtgacccgacggcgcagttttcattgagctgacgtcacctgccgtcttcccggtcttcgctgccggcgctgccgcagctgccgttgccgctggcgctgcggtcgtcgtggtcggtttgctctgagcggtggccaccggtttgctttcgctgacggacgttttcgccggagcggtggtcgccgtgctttcaacatgcttcggctggaccggcttcgattctaccggcgttttcgccacggcctgtggcttcgactgcggcttcgcttcgataacggtatgcttacgttcagccggacgcggggtcgctgctgtctgacgctcggtcgcctggcgcggcgccgcggtgccattggcgccattccggattggcgcgacggtagccggttcagtcggcagcgtcgagttagccacggcgccgtccagttggccctgctgctgggtcaaggcattgttcagatcgccctgaacttcgatacgctgctggccctgcggcgcaaccgctgcctggccctgcgtcgggttcgcggcaataggcggtaccgttacgtcctgctgtgaggtgctgttagcggcggcagtctggtcctggccggcagcaggcatgctggcggactggtcgtcagacagattaatgctcttctcgccggaagcggtctgctggctggaagatgatggcgatttcagtgcggaaccgatacccacgatcaacagcagcagcaccagaatccccacacccatcatgatgtactggcgggaggccggtttggccggcgcttttttacgcttgcgcggacgacgctctacaggctgctcttcgagcatctcctcgtcttgcgcatccagttcttcttcgaactcttcctcttcacgctcgcgacgggccttaccagcgcgcgtcggacggccttcatcggcatcaagatcaacatcgtcaaaattgatctgcggatcggcatcacgctcggaagactgacgggaacgaccagcacgacgatcgttgcgatcggctttcatatcgtcttctggtttgaaatcatccatttaacaccccactaaaaggcttatgctcacgattattgcacatcacccgaaatgataacgccgcgcgaacgcggccagaccttcttattgttgcgcctgctgagtatcagcaatcgcgccaagaaccacatcgtgcggcactccgccgcgcagctcgctgcttcctattgcgagcgggagcaccagccgcatttcgccagccagtacctttttatcgcgcatcatatggggcaaatacgcctgcgcactcatttcctgcgggccgcgtaccggtaagcctgcacgcttgagcagatcgataatgcgctgagtatcctgcgcgcggaactgccccagccgttcggacgtgcgtgccgccatcaccatacctgccgccaccgcttcgccatgcagccagttaccgtagcccatttccgcttcgatagcatggccgaaggtatgtccaagattgagtaaagcacgtaacccggtttcacgctcgtcggctgccacaacctccgctttcagttcacagcagcggcgaatgcagtacgccatggcggtatcgtccagcgccagcagcgcatcaatgttgttttccagccagctgaagaattcaccatccaggatcaccccgtacttgatgacctcagccagtccggaagcgagctcgcgcttcggcagagttttcagacagttaagatcaactaccacggaaaccggctgccagaaggcgccaatcatgtttttgccgagagggtggttcactgcggttttgccgccgaccgacgagtcgacctgcgacaacagggtggtagggacctggatgaaacgcacgccgcgctgatagcttgccgcggcgaaaccggttaaatcaccgatcacccccccgccaagcgccaccagagtggtgtcgcggccatgtggtttttgcaacagcgcagtaaacacggtatccatcaccgccaggcttttgtattgctcgccgtctggcagaatgacgctgtcaacgttgacccctgactgctccagcgcagagcggacggtatccagataaagcggcgccagcgtttcgttggtgaccagcatagcctggtcgcccgacttgagtggcaggaaggaagctggatcgttaaacaaaccagccgcgatggtaatcgggtaactacgttccccgagggtaacagtaagcctctccataacgcgacatccacctcaatgactattactctgacgcacttttattaagccagaatcagttgctttccagcatatgaataatctggttcgcgacgactttcgcactctgatcgtctgtgcggatagtcacatcggcgatctcttcatacagcgggttacgctcgtcagccagcgcttccagcacttcacgaggcggcgcatcgacttgtagcaaaggacgctttttatcgcgctgcgtacgggccaactgcttctcgatcgtagtttccaggtagaccaccacgccgcgggcggagagacggttacgcgtttcacgggattttacagagccgccgccagtcgccagcacaatcccctgtttttccgtcaactcattgataattttctcttcacggtcacggaagccttcttcgccttcaacatcgaagacccagcccacatcagcgccagtgcgtttctcaatctcttgatcagaatcgtaaaattccatgttgagctgttgggctaactggcgcccaatagtgcttttgccggcacccataggcccaaccagaaagatattgcgtttctctgccattttttcggtactactaagactattcgttaatgataaacccgcttcgcagacacccagcgccgcagggcatgaactgaaacctcatatgcaatagagcgagagtcagactaaaaattatctcaatactccggctggtttggcaactgaataaaatcgccggacaataaagggaggattgatgtcgtacccgactctcaaatcggtaccccttgtatgctaaatccgtcctcacgtcaaacacctgaaacgtgtttagcatgaaaaacctgcttaacgtactgccagaatccgtggcgtaataaagacaaccagttcgcgacgttcattatctttcccgtcacgacgaaacagacgtcccagtaccgggatatcgccaagcagcgggacgctgtcgcgggcggttttgtttttctgcgaaaagatgccgcccaacgctaaagtctcgccgctgcgaacttccaccagggtctctatctcctgcttatcgatggccagcgcttcgccgttttcctgcttcagcacctggcctggcgtattctcgcttattcgcagcttaagccgcactcttccctgctgcagcaccgtcggcgtgacctccatgcccagcaccgcctctttgaactccaccgaagtggcgccgctttcgccactggaaacctgataggggatctcgcttccctgcttgatgctggcaggctgcatgtgggaggccaataaacgcgggctggcaataatttcgacctgctgcttgcgctccagcgcggatagctccagctcaagcaagcgaccgttgatcttgccgatgttaaaccctgcgcgggtgctggcatcgtttaccgatacatcgctgcttagggtggtgatttgcccggagcctggcgggcttccggcttccgcaagccgccacttcacccccagctcacgaaggctggtttcgctcatcgacacgatatgggcggccagctccacctggccgaccggcagatccatctcctgcgcccaggccttcaacgccggcaggtgccgggcatcatcgcggatcagcagccgattagtccgtttgtccgccatcaggtgtcccctggcgctgagcagctttccgccgcttttagccagctcctcagcgtcggcaaagtgcagggtcacgctctccgcctgcaggggcaggttctgcaggcgtttctcctgttcggcttcacgctgcgcctgatttgccttttgccaggcctgagtgtgcgcgtagatgaccgtcccctgctgttgcaaagagagacccgcgctatccgctaccgcccgcagcgcctggctccagggaaccttctgcagacgcagggagagcgtgccgctgacgtccggcgcgacgacgaggttcttatggttcatttcggccagggcttgcagcacctgggccactggcgcatcgtcaatcaccagcgaaaccggtttatcattgcgggcggcgggggccaccgccagcggcagcagcagaagcagcaggcttatccatcgcatcatgttgtttcccttcacgttgccagcgccacgctggcggttcacatcccgaagacgtgacgatgtccagctcaccggccgtcagccggctcacccgccagcccgtgggcaattgctcatccatgcgtacccgtcgccactttccgttcccatcctgcagaaaccccgtccagccagcctcatccccaaccgccccgccatagcgccattgcgaaagctgcgccgtgcggcagggatcctccaccggctggaaagggtcacgctcggccgccagcagcgacagcggtagccacaggaagatccagcgtttaccgctcatcttccgcctccagcagcagtcgcaggcggagcgtctgcgcctcacggcccagcgaaaacgaacgcggattcatcccgcagcgcgccagccaggaaaaaagcgcgggtaccgttgaccaggacagggtcagctccatctcgccgccgcttccctgcggacgccaggcgataagcttcgctccggagagcggaatggctatgggcgaaaatgactgcgtgtcgatgcgcgccccgggattttcctcgccggggatgcgcagcgccatgatccgccgccactgcgtttgcaacgccgcatcacgggttaccgccgcctgcggcgggcgcagatcgcgccagagcgccacgccgcctcccgacagccccattgcgagcaggatcggcagccccgtccaggcgccccgaaggttaatccgcatcagcgcgcgctcccgtcagggtaaaactgaactgccaacgcccctcggcgtcgcgctgggtcccgccggcttttgccggcgcgaatcccgcgacgcgagtcagcgcagcctccacgctggttagcgcctgcaggttaagggccaggccgtccagcgtgaggagtacgccctggtactccagccgcgtcagccacgcctgcgcgggcagatctgccgccagcgcctgcagcctgggttgccaggcggcgatcgccgatctgcgctggtactgctggcgctgccgttgatgctgctgccacgcctcacgcatcgcctgctcgcgctgcttaagcgaagcgagcagctgcgcgtcggccgtcgtgtgaagcgtcgccaggaagtcgcgctgcagacgcgccgttcggctcaccagcaggcccatcccgcccagcagcacaatgccgatggttaacaacaggacgtagcgcaggcgctggcggcgacgcaggtcgcgccagggaagaagattaacgacatgcgtcatgccgcccgcctcccagcgccagcccaagggcaatggcgtaacgatcgccatcggctggcagcgggggctgccgacggtgaatcacttgccagacatcaaagcgactggcctcatcgcccgcgtcaatacacaggcgcagcggaatctgaagctgccccgccagctggcttaaggacccgacatcagcgcaggcgtcgctgccccaggcctcacgggtcgcccacagccagcgcttttcatcccgccacgccaggccctggtctgccgcagtcatccaggggaaaaaggcgccgagcgcactggcatccggtacgatggccgccacccgcagccgcagccgccctgccagctcccgcagaacattgatatccagccgctgcgccgccgtaacctgccagccgtcatcccgcgaggtgggcgcataatcaatacatagcgcggaggcaggcattgccagctgctggctcatggcgctggctacccacgtcgcctgttcccgctcccgcagggcgaactggggatacggaagacgcttttgcagtgtgcgcaccgcgggaaaggcgatactaacctgatgctgcgccggtagctcccgccgccaggcggccagccgcgaaccgagtgcgctgacgtccgccaccattccctgacgcaccagccccggcggcaatgggatacgccaccagcggcgcagcgcccagtgtgaacgttcatgcaatagcgcgacaatggcaatgctatcctgttggatatgcattccaagccgccagtttctgaaagccatgcttacgatctccttatccggcaaaactgcccggctatatcaatgcacctggcttgcctttatactaccgcgcgtttgtttataaactgcccaaataaaactaaatgggaaaacaccggtgaagttcgtaaagtatctattgatccttgcagtctgttgcgtactgctgggagcaggctcgatttttggcctctacaaatacatagagccgcaactccccgacgtcgcaaccctgaaggatgtgcgtttgcagatcccgatgcaggtctatagcgccgacggtgagcttattgcgcagtacggcgaaaagcgccgtatccctgtgacgttgcagcaaattccccccgagctggtgaaagcgtttatcgccaccgaagacagccgcttctatgagcaccatggcgtcgatccggtaggtattttccgcgccgccagcgtggcgatgttttcaggccacgcctcccagggcgccagcaccatcacccagcagttagcgcgtaacttctttctcagccccgagaagacgttgatgcgtaagattaaagaggcctttctggccatccgcatcgagcagttgctgaataaagatgaaatccttgagctgtatctgaacaagatctacctcggctaccgcgcctatggcgtcggcgccgcggcgcaggtctattttggcaaacctatcgaccaactgaccctgagtgagatggcggtgattgccggtctgccgaaagcgccttccacttttaacccgctctattcgatggatcgcgcgaccgcccgtcgcaacgtggtgctgtcgcgtatgctgagcgaaggatacatcacccaggcgcaatacgatgaggcgcgcagcgaacccatcgacgccagctatcacgcgccgaaaatcgccttctccgccccttacctgagtgaaatggtgcgccaggagatggtgaatcgctacggcgagcaggcctacgaagatggttatcgggtctacaccaccattacccgtaaaaaccagcaggcggcccagcaggcggtacgcaataacgtgctggattacgatatgcgtcacggctaccgcggcccggccagcgtactgtggaaagtcggcgaaacgccgtgggagacgaagaagatcgtcgattcgctgaagcgtcagtctggctacggtccgcttttcccggcggtggtcacctccgcgaatgcccaggaggctgtcgcgctgttggctaacggcgactccgtttcgctgacgatggagggcgtgcgctgggcccgtcgctttatctcagatacgcagcaaggggcgaccccgcgtaaagtcaacgacgttgtgcaggccgggcagcagatctgggtacgcaaggtgggtgacagctggtggctgtcccagctcccggacgtcaactcagcgctggtctccattaacccgcaaaacggcgcgattattgcccttgtcggcgggtttgactttaaccagagcaagttcaaccgcgccacccaggcgctgcgccaggtcggctccaacattaaaccgttcctctataccgccgcgatggataaaggcttaacgctggcaagtatgctcaacgatgtgccgatctcgcgctgggatgcgggcgcaggttccgactggcggccgaagaactcgccgccgcagtatgccggtccgattcgtttacgccagggcctggggcagtcgaaaaacgtggtgatggtgcgcgctatgcgcgccatgggcgtagactacgccgccgagtatctgcagcgctttggcttcccggcgcagaacattgtccacacggaatcgttggcgctgggctcagcctcctttacgcccctgcaggtcgctcgcggttattcggtgatggccaacggcggcttcctggtcaatcctttctttatcagtaagattgagaacgatcagggcggggtcctcttcgaggagcgtccgaaaattgcctgtccgcagtgtgatttaccggtaatttacggcgatacgccaaaatccaacgtgctggaaaacaaggatgtggaagatgtcgccacctccgcggaaccgcagaatggcaacgtgccgccgcagccgcagctggagcaggccaaccagtcgctggtcgcgcagagcggcgcacaggaatacgcgccgcatgtgattaacacaccgctggccttcctgatcaagagcgcgctgaacagcaacatctttggcgagccgggctggatgggcaccggctggcgcgccggacgcgatctgcagcggcatgacatcggtgggaaaaccgggaccaccaacagctcgaaggacgcctggttctcaggctacggaccgggcgtggtgacctcggtttggatcggctttgacgatcatcgtcgcgatcttggccggaccaccgcctccggagcgattaaagatcagatctctggctatgaaggcggtgccaaaagcgcccagccggcctgggacagctttatgaagagcgtgctggaaggcgttccggaagaaccgttaactccgccgccgggtatcgtcacggtgaatatcgaccgcagcaccggtcagttggcgaacgggggcaatagccgggcggagtactttattgaaggaacccagcccacccagcaggcagtccgtgaggtgggcaccaccctgactgacggcggcggtgaaacccacgaattgttctgacaaaaaaagcgcctgcgggcgcttttttattgctgcttagcgtggacgctcgttcagagtcggccctgggcctgcagccattcccgcactaaaaacagcgcgctgacgttacgggcctcgttaaaatcttcttcatccagcagcgacatcagctgcgccagcggccagcgcacctgcggtagcggctcaggttcatcgcccggcagtgactccggatagagatcttccgccaccatgatattcattttgctggagaagtaggagggggccatactgagcttcttcaaaaacgtcagcttattggcgccatagccaacctcttctttcagctcgcgattggccgcttcatccacggtttcacctggatcaatcagccctttggagaagcccagctcgtaggactccgtccccacggcatactcacgaatcaaaataatgtgatcatccacaatcggcacaatcatcaccgcttcacgggtggaaggccgcatacgttcataaacgcgacgcacaccgttgctgaactccagatcgacgctttcgacattaaagaggcgcgaacgggcgacagtttcaacattgagaatggtgggtttttgtaatgatttgctcattgtcatcggtctatgctgtgattaagcagtcattgtgcgatacgcaacacgctttcggcaatccaaattgctacttatttacagagttgcaaccttttccctgcagggggaaaagtaataaagataaaaaagtcaatagcttgaattcgctttgagaatttaccgatttctgcgctttaacgtttttggtaagcttgtgcgctgctgcatgacatattcactaccctgtaagcaggtgcgccgctaacactgcagcttgacgttagtcttcacgttcaccgacgatttcgtaagaaaaaaataactttgatgggatgggcatgggcacctttctgatattccttacagctctgctaatctgcgtattgctcatcggatggtggtatcgcgctcacgccagacgccgccgactcccctactgcacgcctttagcgacgctaccacgcggcagcttcctgcggatgagcgccaggctattgagaagtatgttgccgagttgagccacgcccagcaggtgccggcgtccggtgcgaccagcgcgcctgtcgctctggcgctcaacgaacagagtgataccgtctatgcggtgacacgcgccatcacccgctacgggatcaccaccgacgcgccgaataaatggcgctatttcctcgattcggttgaagttcatctgccgccgttctgggaacagcatatcaacgatgaaaacagcgtcgagctgatccccaccgacagcctgccgctggttatcacccttaacggtcatagcctgagcgactatcgccaggaagcgcaaagctacgccctggaacgcgcttcggccacccaggcctccattcgcggcgaagagagcgagcaggtagagttgcggcagatccgtcgggaaacgcctgaagaacacgctctgaatcgcccggacgggctgcgcgaagcgatcctgatcgtcgcctcctttctgttcttttatttcagcctgattgggccagctgtctttaccccctggctggtcgccgcaggtttgttgctgctcgccgccggactgtgggggatttatgccccgccgcgtcgcgccgcgctgcgcgaaatccattgcctgcggggcgtccctaagcgctggggattgtttggcgaaaacgatcaggagcaaatcaataacatctcgctgggcattatcgatctcatctatccgcgccactggcaaccctggattgcccaggacctggggcagcagaccgatattgatatctatctcaaccgccacgtggcccgtcagggacgctacctgtcgcttcatgatgaagtgaaaaacttcccgctgcagtactggctacgcagcgcgattatcgccgccggcgccctggtggtggtgattatgctgtgggccagcgtaccgttgaatatgccgtttaagttcaccctgtcgtggctgaagggcgcgcaaacgattgaagccactaccgtcagccagctggaaaaagcccatgtgcgcattggcgatacgctgcgcctgaccggtaccgggatgtgtaatatccgcacgccgggcagttggtccgccaaagaggattcgccgttcctgcctttcgattgttcacagattgtgtggaacgacgcccctcctctgccgctgccggagtctgacattgtcagcaaagcgaccgccctgatgcagtccgtccagcgccagctgcacccggaaaccgacgatgattcccgcgtcagccctgccctacgctccgccattcagaaatcaggcatggtgctactggatgatttcggcgatatcgtgcagaaaactaacgatctctgctcggcaaaggatgattgcctgcggctgaagaatgcgttggtcaatcttggcaatacccgtaactgggaaacgttaaccaagcgcgccaccgccggcaagctggatggcgtgaacgtgctgctgcggccggtcagcgccgagtcgctggagaatctggtgaccacctcaaccgcgccctttgtgatacgcgaaacctcgcgggccgcgcaggcgctgaacagcccggctcccggcggttttcttatcgccagcgatgagggcagcgtattggtcaatcagccgtggccggcggtgagtctgtatgattatccggcccatgagcagtggggcgaactgcggcggctggccggtatgctcatgcatacccccttccatgccgaaggtatcgttaccaacctgtttactgacgccaacggcacgcagcatatcaacctgcatcgcatccccgaccgcagcggcctgtggcgttatctgggcatcaccctgctgctgctgtcaatggtggggtgcatggcttaccacgccgtgcaggccctgcgtcgttatcaacgccatcgtcagcgtatggaagagattcagaaatattacgaaagctgccttaatccggttttgctcccctcagctgactcgcaagattaattttcccggcgacagggtgtgataccctgtcgcccattttccgctcgctggagagtcatcatgcactttgatatcgcctggcaggaggtcgataccgttctgctggatatggacggcacgctcctggacctcgccttcgacaactacttctggcaaacgctggtgcctgaaacctggggggccgcccgcggcctcaatttgcaggaggcgaaagacgccatgcgccaggagtatcacgccgtgcagcatacgctaaactggtactgtctggattactggagcgagcgcctgggtttggatatttgtgcgatgaccagcgaacaaggtccgcgcgccacgctgcgcgaggataccgtgccgttccttgatgcgctcaaggcctgcggtaagcgacgcattctgttgactaatgcccatccccacaatctggcggtgaagctcaaacacaccggcctggacgcgcaccttgatttattactttccacccacacatttggttatccgaaagaggatcagcgtctgtggcgcgccgtggcggaggaaactggccttgaggcgcacaaaacgctgtttgtcgacgacagcgaggcgatactggatgccgcgagggagtttggcattcgttactgcctgggtattaccaatcctgactccggactggcggaaaagcagtatctgcgccatccggggctgaatgattaccgacgactgatcccttcgcttaccccgaaggagaggcgatgaaagagaagcccaccgaaaccgtcagactggacaaatggctttgggccgcccgcttttacaaaacccgcgcgctggcgcgggaaatgattgaaggcggcaaggtgcattacaacggacaacgtagcaaacccggaaaaattgtcgaactcgacgccatgctgacgctgcgccagggcaacgacgagcggacggtgcgcattatcggtattaccgaacagcgccgcccggcaagcgaagccgtcaacctgtatgaagagacagcggagagtatcgagaagcgtgaaaaaatggccctggcgcgcaaaatgaacgccctgaccatgccgcaccctgacagacgtccggacaagaaagagcgccgcgacctgatgagatttaaacacggcgagagtgaataactcgcgccagaaagagagatgattatgactcaacacgatcaattacatcgttatctgtttgaaaactatgccgtgcgcggcgagctggtgacggtgtcggaaaccctagaacagattctggcgaatcacacctatccccaaccggtcaaaacggtgctggcggagctgttggtcgccaccagtctgctgaccgcgacgctgaagtttgccggcgacattaccgtacagctgcagggggatggccctttacagctggcggtgatcaacggcaataaccagcagcagctgcgcggcgtagcgcgcgtgcagggcgagattgcggacgatgcggatctgaaaacgatggtcggcaacggctacctggtcattaccatctctccggaagaaggtgagcgctatcagggcgtggtcggtctggaaggcgatacgctggccgcctgcctggaagattatttccagcgttcagagcagctgccgacgcgccttatcatccgcaccggcgatcatgaaggccagccgatggcgggcgggatgctgctgcaggtgatgccggcgcaggatgcccagactgccgacttcgagcacctggcgacgcttaccgagaccattaaggcggaagagctgttcaccctgccggcaaatgatgtgctgtggcgtctgtaccatgaagaagaagtcacggtctacgacccgcagagcgtggagttcaagtgcacctgctcccgcgaacgctgcgccggcgcgctgaagacgctgccggatgaagagattgatagcatcctcgccgacgaaggcgaaattgatatgcactgcgactactgcggtaaccactatatcttcaatgccatggacatcgccgagatccgtaataacgcctctccggccgatccgcaggttcattaatccccgcatctttctcaggcacagggcggcaatgttgtttgtcgcgttgtgcctgacttttaatttattcgcgagttgaatcgattttccctgaaagagttacgtaatttaatttcaggaaagcgattacattcacatttcggcagtttttttaattactttttaaccattgagaaacatctaaccccaccatccgcccatttcctgagataatccactccacttcgtgacaggagtcaccgtttttatcgtcattctgaggaatgtcgagatacgtaaatctatgagcctggtcgcggtcaatacccggcaattaaccctacaatttacagcagtacatcttggctaaggagcagtgacatgcgcgttaatcatggtttaaccccgcaggatctcaaggcttatggtatcaatgacgtccaggatatcgtccacaaccccagctacgacatgttgtttcaggaagagctcgacccgaacctggaaggctacgaacgtggcgtattaaccactctgggtgctatcgccgtcgacacgggcatttttaccggtcgttctccgaaagataagtatctcgtgcgcgacgacaccacccgcgacaccgtctggtggtccgataaaggcaaaggtaaaaacgacaacaagccgctttcgcaggaaacctggcagcatctgaaagggctggtgacccagcaactgtccggtaaacgcctgtttgtcgtcgacgctttctgcggcgccaacgccgatacccgtctcagcgtacgtttcattaccgaagtggcctggcaggcgcacttcgttaaaaacatgttcatccgtccgagcgatgaagagctggctgaattcgagcccgacttcatcgtgatgaacggcgcgaaatgcaccaatccgcagtggaaagagcagggcctcaattcggaaaacttcgtcgccttcaacctcaccgagcgcattcagttgatcggcggcacctggtacggcggcgagatgaagaaagggatgttctcgatcatgaactacctgctgccgctgaagggcatcgcctccatgcactgctcagccaacgtcggcgagaaaggcgatgtcgccattttcttcggcctctcaggcaccggcaaaaccaccctctccaccgacccgaaacgccgcctgattggcgatgacgaacatggctgggatgacgacggcgtgtttaacttcgaagggggctgctacgccaagaccatcaagctctctgaagcggccgagccggatatctatcacgccatccgccgcaacgccctgctggaaaacgtggtggtacgcgccgacggcacggtcgatttcgatgacggttcaaagaccgaaaatacccgcgtctcctaccccatcgaccacatcgacaacattgttaagccggtgtctaaagcgggtcacgccaccaaagtgatcttcctgacggccgatgcgttcggcgtcctgccgccggtctcccgcctgaccgccgaccagacgcagtaccatttcctgtccgggtttaccgccaaactggccggcaccgagcgcggcgtaaccgaacccacgccaaccttctccgcctgcttcggcgccgccttcctgtcgctgcacccgacgcagtacgccgaagtgctggtcaaacgcatgcaggcggctggcgcgcaggcttatctggtcaataccggctggaacggcaccggcaagcgcatctcgattaaagatacccgcgcgatcatcgacgccatcctcaatggctcgctggacaacgcggagacctttaccctaccgatgtttaacctgcagatcccgacggcgctcccgggcgtggatacccacatcctcgatccgcgcagcacctatggttccccggagcagtggcaggaaaaagccgaccagctggcgaagctgtttattgagaattttgagaagtataccgatacgccagcgggcgccgcgctggtggcggcaggaccgcagcgctaacgggcgcaaaggtgaaaaagccgggcttgcccggctttttattgtgcaacatcctgagtagctaaccgcgggcgcgatcagctctccctggcgggtttcatcggcgtcagcatccggtgcaccggcagccaggcgcggatcagtaacccgccgcgttcgctggagccaatctccagccggccgttgtgattgtcgataatacgctgaacaatcgccaaccccagcccggtgccgctggtgctgcgggcgctgtcgccgcgtacaaacggctgaaacaggtgctccctctgctcaggtttaatccccggtccatcatcttctacctggaaccaggcccggctcgcttcgctgccgctgctgaccttgatccagccattgccatagcgggccgcgttgaccaccatattcgccagcgcgcgcttgatagacagcgggtgcatacgtaccggaatttcgccggcctgcagggcggtggcgatttcccgctcatagccgctctccgcagcgatcacttcccccagcaccgcattcagatccgccagctccatcggcatctcctgcccggtgcgcagatagtcgataaactgctcgatgatggcgttgcactcttcgatatctttgttgatcgactccgcgagatagccgtcctgctcgcccatcatctcggtggccagacgaatgcgggtcagcggggttcgtaaatcatgactgaccccggccatcagcagcgtacggtcatcagccaactgcttcacgcccgccgccatatggttaaaggcgcgcgtcaccgaacgcacttcggaggcgccatactcgcgcagcggcggcggaataatgccgcgcccgacctgcagcgccgcgtgctccagatccaccaacgggcggttctgaatacgaataaacagccaggcgccgcctatcgccagcagcatgatcgccagggtatagcggaacagcggcgagaagtcgccctgatggatctcggtcagcggcacccgcacccagatattgggcgacagccaggtcttcagccacaccacaggggagcttttattgacctctacccgcacctctgtggggccaccaagctgatgggccatctgctgacttaagaattcataatgctgcgcccagcgcaggcctgcgtcttccgccgcttcattggaatagagcgaaatccccagctcgcgataaatttcacgacgaaacgccgggggcaccaccagctgggtgccatcctccagctgcagtttgtcggtcatcagcatacgcacttcgtaggctaacactttattaaactgctggagactcggcaggatcgcgaaattcagtaccaccagataggtcgtcaccaggctgacgaacagcaaggtgacgatcaggagcagtgtgcgagcaaaggagctgcgcggcgaaaagcgcacgcgtttcatgccttagaaccgtccgggacgaagacgtagcccagaccccagacggtctggatgtagcgcggatgcgccgggtcctcttccaccatgcggcgcaggcgggagatctgtacgtcgatggagcgctccatcgcagagtattcgcggccgcgggcgaggttcatcagcttatcgcgcgacagcggctcacggggatggctcaccagcgccttcaggaccgcgaattcgccgctggtcaacggcatcggctcgtcttcacggaacatctcgcgggtacccaggttcagtttgaatttaccaaaggcgataaccgcctcttcctgcgacggcgcgcccggcagctcgttcgcctggcgacgcagcaccgcccggatgcgggccagcagttcgcgcgggttaaacggcttcggaatatagtcgtcagcaccgatctccaggcccacgatccgatcgacctcttcgcctttcgccgtcaccataatgatcggcatcgggttactctggctgcgcagacgacggcagatagagagaccatcttcgcccggcagcatcagatccagcaccatcaggtggaaggattcacgggttaacagacgatccatctgttcggcgttcgccacgctacgaacctggaagccctgctcggtcagataacgctcgagcagcgcacgcaggcgcatgtcgtcatccacaaccagaatcttataattctcttgcattgtttgtactcccaaaggttcactgcaatagtcagtgcgtattctcaaaaaagcccggcgcgctcaccagctaaatctggtatatattccaggctaaattgttacaaagcatatttaacagcaggttaagtatacatttaatcataagacacagtatttatcctgtcggtattattacgcgctacaaattgtgcgcaacgacagacagtcagaaggttgaactcacgatgaaaacgccgctgatcacccgcgagggatatgaaaaactgaagcaggagatggactacctgtggcgccaggagcgtccggaagtgaccaaaaaggtgacctgggccgccagcctcggcgaccgcagcgagaacgcggactaccagtacaacaaaaagcgcctgcgggagatcgatcgccgggtccgctatctgaccaaatgtctggaacagttgaaaatcgtcgattactcgccgcaacaggaaggtaaagtcttcttcggcgcctgggtagagattgaaaacgatgaaggcgatatcaagcgctttcgcatcgtcggttacgatgaaatttttggccgcaaagactatatctccatcgactcgccgatggcgcgcgcactgttaaaaaaagaggttggcgatctggccatcgtcaacacgccggcgggcgaagccagctggtatgtcaacgagatcgaatacgttaaatagacaagaactttccgagagacgcccggcgcggctggtatttttagccgtcagtccgtataactagtccctgttttttgaccctaaagatgaattaaaagccatgatgaatgattcgctctgccgcattattgcgggtgaacttcaggccagagccgaacaggtagaagctgccgttcgcctgcttgatgaagggaacaccgtgccgtttattgcacgttatcgtaaagaagtcaccggcggtctggatgacacgcagctgcgtaatctggaaactcgcctcggctatctgcgcgaactcgaagaccgtcgtcaggcgatcctcaaatccatcgctgaacagggcaaactgaccgacgcgctggaaaaagccatcaacaccacgctcagcaaaaccgaactggaagatctctacctgccctacaagccgaagcgccgtacacgcggccagatcgctatcgaagccgggctcgaaccgctggctgacctgctgtggaacgaaccggcccacgatccggaagcggaggccgcaaaatatattgatgccgataagggcgtagccgacagcaaagcggccctggacggcgcgcgctatattctgatggagcggtttgccgaagacgccgcgctgctggcgaaggtccgtgactatctgtggaaaaacgcccacctggtctccaccgtcgtcagcggtaaagaagaggaaggcgctaaattccgcgactacttcgatcaccatgaaccgatcgccaccgtgccgtcgcatcgcgcgctggcgatgttccgcggtcgcaacgaaggcgtcctgcagctctctttaaacgctgacccgcagtttgacgagccgccgaaagagagccacggcgagcaaattattatcgaccacctgggcctgcgcctgaataacgccccggcggacagctggcgtaaaggcgtcgtcagctggacctggcggatcaaagtcctgatgcatctcgaaaccgagctgatgggcaccgtgcgcgaacgcgcggaggacgaggcaatcaacgtcttcgcccgcaacctgcacgatctgctgatggccgcgcccgccgggctgcgcgccaccatgggactcgatccgggcctgcgcaccggggtgaaagtggccgtcgtcgacgccaccggtaaactggtcgctaccgataccatctatccccacaccggccaggccgccaaagcggccgtcgccgtcgccgcgctgtgtgagaagtacaacgttgagctggtggccatcggcaacggtaccgcctcgcgtgaaaccgagcgtttcttcctcgacgtgcagaaacagttcccgaaggtcaccgcccagaaggtgatcgtcagcgaagccggggcttccgtttactccgcctccgagctggcggcgcaggagtttccggacctcgacgtgtcgctgcgcggcgcggtctccatcgcccgccgtctgcaggatcccctggccgagctggtgaaaatcgacccaaaatccattggcgtcggccagtatcagcacgacgtcagccagacccagctggcgcgtaagctggacgcggtggtggaagactgtgtgaacgccgtcggcgttgacctgaacaccgcctccgttccgctgctgacccgcgtcgccggcctgacccgcatgatggcgcagaacatcgtcgcctggcgcgacgagaatggtcagttccaaaaccgccagcagctgctgaaagtcagccgtctggggccgaaagcctttgaacagtgcgcgggcttcctgcgtatcaaccacggcgacaaccctctggatgcctccaccgttcacccggaagcttacccggtggtcgaacgtattctggccgccacccagcaggcgctgaaagatctgatgggcaatagcagtgcgctgcgccacctgaaggcagtggacttcaccgatgagaagtttggcgtcccgacggtcaccgacattatcaaagagctggaaaaaccgggccgcgatccgcgtccggagtttaagaccgcgaagttcgccgatggtgtggagaccatgaatgacctgctgccgggaatgattctggaaggtgccgtcaccaacgtcaccaacttcggcgcgtttgttgatatcggcgttcatcaggacggactggtacacatttcgtcgctttctgaccggtttgttgaggatccgcacaccgtggtgaaagcgggcgacatcgtcaaggtcaaagtgatggaagtcgatctgccgcgtaagcgtatcgccctgaccatgcgtctcgacgagcagccgggcgacagcaacgcccgccgcggcggtggtcaggagcgcccgcagggtaaccgcccggccgcgaaagccgccaaaccccgcggtcgcgaggcgcagcctgccggcaacagcgcgatgatggatgccctcgccgcagcgatgggtaaaaaacgctaaactctccctgcccctttttcaggggcagttttttttcatgaccaggccatcgccatcacgcgcaaaacagcttcagttgtttctgataacctacttttattccacgcctgaaaggcagcgaaattaatattttcatttcgttaacttcagaaaccttaattaaacattagatcgccgaaataatatttcgcgcatttttgattacaggctgactttgcggcatatcaataaaaaggtgattttcactttaaaaatagcctgcagcgcatcatatgtattgatgataaaaaccattctcattatcatcgattacagaacgttttttcttttttcgttggctacggtccccggcgcaactgcctccaggcgtccggaaaattcttcttcggttagcgatagacaagtaggccctatgcaattcacacctgatagtgcgtggaaaattaccggtttttctcgcgatattagcccagcataccgtcagaaactgctctccctcggcatgctgcccggttcctcttttcatgtggttcgcgtggcgccgctcggcgatcctgttcatattgaaacccgacgcgtcagtctggtattacgcaaaaaagatctcgccttaatcgaactggaagcggttgcacaataacggctggcccggcacaagagtctgaaatatgcaaaaattaaccgttggtttaattggtaatcctaattccggcaagaccaccttatttaatcagctgaccggcgctcgccagcgcgtgggcaactgggctggggtgaccgttgagcgtaaagaggggattttcgccaccactgaccaccaggtcacgctggtcgacctcccgggaacctactccctgaccaccatctcctcgcagacctcgctggacgagcagattgcctgccactacatcctgagcggcgacgccgacatgctgattaacgtggtcgatgcctccaacctcgagcgcaacctctatctgacgctgcagctgctcgagctggggatcccctgcgtcgtcgcgctgaacatgctggatatcgccgaaaagcagcaggtgcggatcgatatcgacgccctcgccgcccgtctcggttgcccggtcattccgctggtatcgactcgcggacgggggatcgaagcgctgaagatcgccctcgaccgtcatcaggcgaacagcgatcttgagctggtccactatccgcagccgctgctgcgcgaagctgacctgctggcgcagcagatgtcagcgcagatcccgacccggcagcggcgctggctgggtctgcagatgctggagggcgatatctacagccgggcctatgccggcgacgccgccgataaactggatatcgccctggcgaatctcagcgacgagatcgacgacccggcgctgcacatcgctgacgcgcgctatcagaccatcgccgccatttgcgacgccgtcagcaataccctgaccgccgaaccaagccgcttcaccgccgcgatggacaaagtgatcctcaaccgcttcctcgggttgccgatttttctctttgtcatgtacttgatgttcctgctggcgatcaacatcggcggcgcgctgcagccgattttcgatgccggctcggtcgcgatctttgtgcatggcattcaatggctgggttacaccctgcacttcccggactggctgaccgtgttcctcgcccaggggatcggcggcggtatcaacaccgtgctgccgctggtgccgcagatcggcatgatgtatctgtttctctccttccttgaggactccggctacatggcgcgcgccgcctttgtgatggatcgcctgatgcaagccctcggcctgccggggaaatccttcgtcccgctgattgtcggttttggctgcaacgtgccgtcggtgatgggcgcccgcacccttgacgcgccgcgcgagcgtctgatgaccattatgatggcgccgtttatgtcctgcggcgcgcggctggcgatcttcgccgtcttcgcggccgccttctttgggcagaacggcgcgctggcggtcttctcgctctatgtgctgggcattgtgatggccatcctcaccggcctgatgctgaagcacaccattatgcgcggcgaagcctcgccgttcgtgatggagctgccggtgtaccacgtcccgcatatcaagagcctgattatccagacctggcagcgcctgaaaggctttgtgctgcgcgccgggaaggtgatcgtcatcgtcagcatcttcctcagcgcgctgaacagcttctcactgagcggtaaggtcgtcgacaacatcaacgactccgcgctggcctcggtgagccgggtcattacgccggtgtttaaaccgatcggcgtgcatgaagataactggcaggccaccgtcggcctgtttaccggcgcgatggcgaaagaggtggtagtgggtacgctgaacaccctctataccgccgaagatatccagaatgaggaattcaatccgcagaccttcagtctcggcgaagaactgctcgccgccgtcgatgagacatggcagggactgaaagacaccttcagcctcagcgtcctggccaaccccatcgaagccagcaaaggcgatggcgaaatggccaccggcgccatgggggtgatgggcagtaaatttggcagcgcagcggcggcatacagctacctgatcttcgtcctgctctatattccctgcatctcggtgatgggcgccatcgcccgcgaatcaagccgcggctggatgaccttctccatcctgtgggggctgaatatcgcctattcgctctcgacgctctattaccagaccgttagctttagcgatcacccgcgctacagtctggtatgtatcctggcggtagtgttgttcaacgtggtgctcttcggcctgttgcgccgggcgcgcagccgggtggacgtctcgctgctggccacgagaaaaacgccggtctcctgctgttccagcccggctggcgattgccactaaggagggactgtggcgtcgttaatggaagtccgcgatatgctggccctgcagggccgcatggaggcgaaacagctcagtgctcgcctgcagacacctcagccgctgattgacgccatgcttgagcgaatggaagccatgggtaaggtggtccggatcagcgaaacgagcgagggctgcctctccggcagctgtaaaagttgccctgaagggaaagcggcgtgccggcaggagtggtgggcgctgcgatgaaaggagtcaggccaggtcgcgcaacgaggtaaaacgagtaagacagctatgaaaaacgggccagcaggcccgttttcttatgactggattatttataaacgtcagcgttcgcgtgtacggttttttcgtttttctgcccggcaatcacaacaaagtatttcccacccagctcatcggcttttttcgacagatcgcggcgggcgtccatcggcgacgtcgtcctggaggtcgtaatgctaccgaccttggtcagattcatcttcgccacgtcttctttttggatctctttcgcggcgaatgcgccgaaagagagggtgcctatcaccagagatgcaaccattcctgtaacaagtttcatagcctctactctccataaggttgttattgtaggtcacggtggcggattgaaataatcaaccaccgtaacaacctaagtattgctaggaatggcccttttaccatggcgcggcaaaaaaaattaccccagccgcgtcttcagcgccagcagcggctcgcagaaggccgcgggatgggaaacaaacggcgcatgcgcggccttatcgaagaggattgactcgctttccggccacaggtcatccagcaacgggacgatcttgcgcggcaccagtccatccagccggccatacagccgcagaaacggcatcggcagcctgaccagcgcctgacgcagatcgacggttctgaggatctccagtccgccattcagcgcctcggcggaaggcatcggcagcgagagcaccgcctgctttaacgcccgcgcatcctgacgcgcgctctctgtgcccatggtttgcagggcgaggaatcgctcgacggtgcgctggaaatcgtcgctcagctgctgctgaaatccggccagcacctcgggcttgatgccgagccagtcgtcacgagccgcgaaacagggggaagaggcgaccgtcaccagcgcctgcacgcgttccggacgcataatcgcgacctggctggccaccagcccgcccaggctccagcccagccacaccgcctgtggaggggcctgctccagcacccgctgcgccatcgcctccagcgacatcgccccaaacccgccgctgcgcccatagcccggcagatccaccaggtggagggtaaaatgcgaagccagctgcggcgtgatgcaatcccatacctgagcgttcagcccccagccgtgcagcagcacaagatgacaatctccttcgccgattgtttgccaccagatgtcgttcatccgttaccgttctctttttactggacagaaggccaaatatgctaacagcacacagcttatgctggctatgccaaatgccgctggcagtcgcccgctgggggatctgctcccgctgcagccgcgccctgctcgcctgtcccccgctctgcccgcagtgcggcctgccggcggcggcatcccgtcacccctgcggccgctgcctgcaaaagccgcctccctggcattggctggtggcggtcaatgactatcgcccgccgctgagcggtctggtgcagcagctgaagtttcaccatcgcccggagctgggccccgccctcgcgcgtctgctgctgcagcgccttctgcagcgtgacgatttgccgccagtagacgctctggtcggcgtgccgctatggcatcgccgtcgctggcgccggggttataatcagtgcgacgaactgtgccgaccgttagcccgctggcgaggatgcgtctggcatcgcgaaggcctgactcgccagcgagccggcgccgtccaacattcgctcaatgcccgccagcgcaggcagaacctgaaaaatgcctttcagcttgaatttgccgtgcagggactccatatcgctctggtggatgatgtcgtcacgaccggcagcaccgtcgccgagatatcccgcctgcttttgcgaaacggcgccgcgacggttcaggtatggtgtttgtgccgtaccttgtagacccccgctgatgggcgtattataacccagtaaaatagtcaactattaggccaacgctatgatccgtatttccgatgctgcacaagcgcactttgccaaactgctggcaaatcaggaagaagggacgcaaattcgcgtatttgtgattaatcccggcaccccaaacgctgagtgcggcgtatcctactgcccaccggatgcggtggaagacaccgacacggcgctgaaatttgaacagctgaccgcctatgtcgatgagctcagcgcgccctatctggaagacgctgaaattgatttcgtcactgaccagctcggctcgcagctgacgctgaaagcgccgaacgccaaaatgcgcaaagtctctgacgatgccccgctgatggagcgcgtcgagtacctgctgcagtcgcagattaacccgcagctggcgggccacggcggccgcgtatcgctgatggagatcaccgacgacggtctggctatcctgcagttcggcggcggatgcaacggctgctcgatggtcgacgtgaccctgaaagaaggtattgaaaaacagctgctgaacgagtttccggagctgaaaggggttcgcgatctgaccgagcatcagcgcggcgagcactcctactactaagcccttcctccggcggcaccctgccgccggtcctccctggccctttctgtgttaccgcgcaacatctcccgctaaacgaccggcaaaaaccggggaaagagtatgacttaagtctcatatttaacattttcccccgtcaggtgattctcaaccctcacatgttacccgtatcatccatttcaggcgccaccggcaaaaaaatagccagctatcctttctctgggtaaggataatgcaagcgtttacggcgccagactattttgctccctgacggagcggatgctctacaggttcgaactttgacgttacccataacaaattaaggccaggtaaatcatgccattagtcatcgttgctatcggggttgccctgttgttgctgttaatgatccgtttcaaaatgaacggcttcattgcgctggttctggtggcgctcgccgtcggattaatgcagggtatgccactggataaagtgatcgtctccatcaaaaacggcgttggcggcacccttggcagcctcgcgctgatcatgggcttcggcgctatgctcggtaagctgctggcagactgcggcggcgcccagcgtatcgccaccacgcttatcaataagttcggtaagaagcatattcagtgggcggtggtcctgaccggcttcaccgttggcttcgccctgttctatgaagtgggcttcgtgctgatgctgccgctggtgttcaccatcgccgcctcggcccgtattccgttgctgtacgtcggcgtaccgatggcagccgcgctctccgtcacccacggcttcctgccgccgcatccgggtccgaccgcgatcgccaccatcttccatgccgatatgggcaaaacgctgctctacggcaccattctggctatcccgacggttatcctggcgggaccggtgtttgcgcgcttcctgaaagggatagataagccgatcccggaaggcctgcataacccgaaagtgttcactgaagaagagatgccaggctttggcgtcagcgtctggacctcgctggttccggtgatcctgatggcgatgcgcgccgtggctgagatgatcctgccgaaaggccacgccttcctgccaattgccgagttcttcggcgacccggtgatggccaccctgattgcggtactgattgccctgttcaccttcggtttgaaccgcggccgctccatggagcagatcaacgataccctgacctcttcgatcaaaatcatcgccatgatgctgttgatcatcggcggcggcggcgccttcaagcaggtgctggtggatagcggcatggataaatacatcgcctctatcatgcacgaatcgaacatgtctccgctgtttatggcgtggtctatcgccgcggtgctgcgtatcgcgctgggttcggctaccgtggccgccatcaccgcgggcgggatcgccgcgccgctgatcgccaccaccggcgtcagcccggagctgatggttatcgccgttggctccggcagcgttatcttctcccatgttaacgatccgggcttctggctgttcaaagagtactttaacctgaccatcggcgagaccatcaagtcctggtcggtgctggaaaccattatctcagtctgcggcctggtgggcagtcagcagctggcctttacccaccaggaggcgaaacaatttttcgactgtcgtctgacatcgcctatcgaagccgacgacagtagccggctgtgcgacgatgtcgccgggtgggccaccgcgctacaactcatcgccctctccgcccgccagaataactcctccgcccaacactccgcccgccgcctcgccgggattaacgccagccatctgtcggattatctggtggatgaagtgctggataacgttgacgcccgcacgcgcaactttttgctgaagagttctctgctgcgctcaatgaacgacgcgttaatcgtgcgcgtcaccggcgaagagaatggccagatgcagctggaggaaatcgaacgccaggggctgttcctgcagcggatggatgattccggcgaatggttccgctatcacccgctgtttggcagcttcctgcgccagcgctgtcagtgggagctggcggttgaactaccggagatccaccgcgccgcggcggaaagctggatggcgcaaggtttccccagcgaggcaatccaccatgcgctggcggccggcgatgccaaaatgctgcgcgatatcttgctcaatcatgcctggggcatgtttaaccatagcgagctggggctactggagcagtcgctggcggcgctgccatggtccaatctgctggaaaatccgcgcctgatcctgctccaggcctggctgatgcagagccagcatcgctacagcgaagtcaataccctgctggcgcgcgccgagcaggagatgagtgtggaaatggacaccgcgatgcatggcgacttcaacgcgctgcgcgcacaggtggcgattaacgatggcgaccaggacgaggcggaacgtctgtcaatggtggccctggaagagctgccgctggccaactattacagccgcatcgtcgccacatcggtgcatggcgaagttctccattgtaagggaaagctgaccaaatccctcgccgtgatgcagcagaccgaacagatggcccgccgtcacgacgtatggcattacgccctgtggagcatcattcagcaaagcgaaatcctcttcgcccagggcttcctgcaggccgcctgggagagccaggagaaagccttccagctggtacgcgaacagcatcttgagcagttgccgatgcatgagttcctgctgcgcatccgttctcagctgctgtgggcatgggcgcgcctcgacgaggctgaagcttgcgcccgccaggggatggacgtgctatccacctatcagccgcagcagcagctgcagtgcctggcgctgatggtccagtgctcactggcgcgcggcgatctggataatgcccgcagccacctgaaccggctggaaaacctgctaggtaatggtcactatcacagcgactgggtctccaacgccgataaggtgcgagtgatctactggcagatgaccggtgataaaaccgcggcggccaactggctgcgccagacgccaaagccggagttcgccaacaaccacttcctgcagagccagtggcgcaacatcgcccgggcgcagatcctgctgggcgatttcgaaccggcggaaatggtgctggaagagctgaacgaaaatgcgcgttcgctgcgtttgatgagcgatctcaaccgcaacctgctgctgctcaatcagctgtactggcagtcgggacgcaagagcgaagcgcagaaagccctgctggaagccctgacgctcgccaaccgcaccggttttatcaaccactttgtgattgaaggcgaggcgatggcccagcagctgcgccagctgatccagttgaacacgttgccggagctggagcagcatcgcgcccagcgtattctgcgcgacatcaaccagcatcatcgccacaaattcgcccactttgacgaagggttcgtcgagcgactgctgaatcatccggaggtgccggagcttatccgcaccagcccgctgacccagcgcgagtggcaggtgcttggcttaatctattccggttacagcaacgagcagattgccggcgagcttgacgtggcggccaccaccatcaagacccacattcgcaacctgtatcagaaactgggcgtcgcccaccggcaggacgcggtacagcatgcccagcagttacttaagatgatgggatacggcgtctgacgacgccgttgccgtttagcacagctccagctgaaggttgttatcagtgatcaccttcagcacgccggccggcggcagcacgtcggtatagaccgcatcgaccatactgatgctgcccatgttgaccatcgcattgcggccaaacttggtatggtccaccaccagcatcacgtggcgtgaattctcaatgatcgcccgcttggtgcgcacttcatgataatcaaactccagcagcgagccatcgctgtctacgccgctgatgccgagaatgccgaagtcgaggcggaactgcgagataaagtcgagggtggcttccccgatgatcccgccgtcccggctacgcagttcgccgccggcgagaataatgcggaagtcctctttcaccatcagcgtgttggcgacgttaaggttattggtcacaatccgcagatcgttgtgatcgagcagggcgtgcgccaccgcttccggcgtggtgccgatatcaataaacagcgtcgccccgtccgggatctcgctggccacccgccgggcgatacgctctttctccgccgtctgggtcgctttgcgatcgtgccaggaggtgttcaccgagctggagggcagcgccgcgccgccgtgatggcggaggatcattttctgttcggctaaatcgttcaggtcgcggcggatggtctgcgggcttaccgcgaactgctcaaccagctcttccgtgctgacgtaaccctgtttttttaccagctcgataatggcgtcatgacgttgtgtttgtttcatgaaatatccctggaaaaatatcgcctacccgacccctgtcggtaagtctttatgcgcgttttcgcccatgtaaggtatcaacaaacgccatcgccaggccggtcgccagaccagccacgtgcgcgccgttggcgatcgccatgccgaaaacatcaaaccagccagcaattaaccacactaaagagaagagtatcaacccgcgctgcagataaataccgctctgcggatcgcgctcgccccgcagccagacgtagcccatcagcgcgtagaccacgcccgacaagccaccaaaccacgggccgctaaactggtgctgcacgaagccgcttagcagagcgctgatgacggtgatcaccaccagcttgccgctgccgatgcgcttttccaccgcgccgccaagataccaccaccatagcaggttgaagagaatatgcatcagcgagaaatgcatgaaagcatggctgaaatagcgccaggcttcgaactgcagcgaaggatcgtagggccaggccagccaaatcatcaccggctgatcgcccagcagattttgcaggatgaacaccgcgatgcagatcagcagaatcgcccaggtgaacggaccggcgttatgccgcagcgtggcaaagaaaggaaagcgctgatagcgcaacccgctattggtctgtccggactgccagctcgccgccagatagcgcgggtccgccgggttttcgagaaaacgcgccagctcagccctgacgcgcccggcctgactctcatcagccagccagacgtcgctctgggtatgctgctggatggtcaggataatcccctgcgtcgccatataatcgacaaacgcctgggccacccgcgggttggcaaaagaggtaatcattaacatgcagcgaatcgcttattccacacaaagggggatagtatacctgccagtcgttaaaacgtcccgcgcgccacttccgccgggaaatggcgatgccaggcgtcgaacccgccgtcaacgctatagaccttatcaaacccctgctgcagcagatactgcgcggcgcccttactgctgttgccgtgatagcacatcaccatcaccgccgtgtcaaagtcgttgtcacgcataaacgcgcccagcgtatcgttggtcagatgaaacgcgcccggcgtatgacccatcgcatagctttgcggatcgcggatatcgaccagtaccgccgtctgctgatgcagtttctggtgcgcttcttcaacattgatgcattcaaactgttccatgattctcttctctttctcgtcatgacgggcgatggccggcccaattttaccctgtagtgtaccgtcaggcggtaaagaaacgccaatatgttacacccatcacttcaaaatgtttttttgatgttaccaaaagcgcgtttgtttgctatagtgagcgatatcgagcatttatgagcttaaacgaaagtgtgagagggtaagaacgtggaaaccaaagatctgattgtgataggcggaggcatcaacggtgccggtatcgcggcagatgccgccgggcgtggtttatccgtactgatgctggaagcgcgcgatctcgcctgcgccacctccagcgccagttccaaactgatccacggcgggctacgctacctcgaacactatgagttccgtctggtcagcgaagcgctggccgagcgtgaagtgctgttaaaaatggccccgcatatcgccttcccgatgcgctttcgcctaccgcatcgcccgcatctgcgcccggcatggatgatccgtatcggcttgtttatgtacgatcatctgggcaaacgcaccagcctcccgggatccaccgggttgcgttttggcgcagaatcggtacttaaaccggaaattgtgcgcggtttcgaatattccgactgctgggtcgacgatgcccgcctggtgctggccaacgcgcagatggtcgtccgcaaaggcggcgaagtgcgtacccgcacccgcgctatctcggcgaaacgtgagaatggcctgtgggtggtggaagcggaagatattgatagcggtgagaagtttacctggaaggcgcgcggcctggtcaatgccaccggcccatgggtcaaacagttcttcgacgaagggatgcatctgcgctcgccttacggcatccgtctgatcaagggcagccacatcgtggtgccgcgggtgcatacccagaaacaggcttatattctgcagaacgaagataaacgcatagtatttgttattccgtggatggatgagttctctatcatcggcacgacggacgtcgagtataagggcgatccgaaagcggtggccattgatgataaagagatcaactatctgctgaacgtctataacgcgcactttaaaaagaccctcagccgggacgatatcgtctggacctactccggcgtccgtccgctgtgcgacgacgagtcggattcgccgcaggccattacccgcgactataccctggatattcacgatgagaacggtcaggcgccgctgctgtccgtcttcggcggcaagctgaccacctatcgcaaactggccgagcatgcactggaaaaactgaccccctattacaaagggatcggcccggcatggaccaaaaccgcggtgctccccggcggcgatatcggcggcgaccgcgacgactacgcggcaaaactgcgccgtcgcttcccgttcatcagtgaatcactggcccgccattatgcccgcacctacgggagcaacagcgagtggatcctgaaggaagccagcgccctgagcgatctcggggaagatttcggccacgagttttatgaagccgagctgaaatatctggtggagcacgagtgggtgcgcagcctggatgacgccatctggcgtcgaaccaaacagggtatgtggctgactgccgagcagcaggcgcgcatcagcgaatggctggcgcagcatgcgggaaagtctgaactgtcgttagcgtcctgacatcgcgtggcgccaggagagaaatacccgggctatggcttgcgcttggcccggatacctgttcacaaattaaacgagactttttttccagtcggcaatgtgacatttatactgagttctccccccaatgccgcaatgtagcgttttagggtcgaaagccgagggtcgttatcagcctgttccattttagcgatcgttggctgctttacccccatagccgcagccatctctgtttgcgacatttgcaactcttctcgaagcaagtttaaagcgacagactggcgtatctctgccgctttcgctgcaatacgctgctggctatcaggactctgtttcgccatgagttcttttagcgtggccattatcgctccttagtcaggtgttggctgaattctctgtcagccagagtaatcatctctttgtaaaaacgtttctcattcatgccatccttatcgcccgcacataaaacgatagctttccgcagaggatcaaaagcaaaaaaggcgcggatggggagcccatgatgctgaacccggagttctttcatattctgaaacgttgaatctttcaccgtatcaacatacgggcgcccaagctgcggagcaaactcagacaggatgagaatcgtggccaacatatcctcttttaaagctctactttgtaattcgaaccaggtatcaaacgtatccgtcgtttctacatcccacataggctatgaacgtaaacttattgagcatttatcgtactgctggcgaattcacgtcaatagtatattcccgcaatagcctgaatcctccccggcacttttccgaataaaacgttcgccacacaacacaacggggccaaatggccccgttgtgttgtgtggtgttgcattgactggcttacagccttaccgggtcgatatgccagatatatttcgcgtactcctggatcgtccggtcagaagagaagtagcccatgttggcaatattcaacattgccttataagcccactcttccgggttttgatacagctcgtcgacgcgatcctggcagtccacatagctacgatagtccgccagaacctggtagtggtcgccaaagttaatcagcgaatccagcaggtcgcggtagcgccccggttctgccgggctgaagacgccggtaccgatctgcgtcagcgcctggtggagctcttcatcctgctcgtaatattcgcgtggtttatagccgctgcgacgtagctcctccacctcttccgcggtgttaccgaagataaagatattctcttcgcccacgtgctcctgcatctccacgtttgccccatcaagggtgccgatagtcagcgcgccgttaagggcaaacttcatattactggtgccggaagcttcagtgcctgcgagggagatctgttccgacaggtctgccgccggaatgatcagctgcgccaggctaacgctgtagttggggataaagacgaccttcagcttgtcgccaatctgcggatcgttattaatcaccgccgccacatcgttgatcaggtgaataatgtgcttggccatgtagtaggccgaggccgccttaccggcgaaaatattcacccgcggcacccactcggcctgcggatcggccttgatccggttatagcgggtgatgacgtgcagcacattcattagctgccgtttgtattcatggatacgtttgatctgcacatcaaacagcgccttcggattgaccaccacattgagctgttgagcaatatagctggccagccgctgtttgttctcaaacttggcctgacgcaccgcctgattgaccatcggatagtcgatatgctgtttcagctcatcaagctgactcagatcggtccgccaggtgcggccgatatgctcatccagcactttcgacagcggcgggttggccagcgccagccagcggcgcggcgtcacaccgttggtcacgttgataaagcgcattgggaagattttggcgaattcggcaaacagtgactccaccatcagtcgggaatgcagctcggacaccccgttgaccttgtggctgaccactaccgccagccaggccatccgcacacggcggccgttagactcgtcgataatcgaggtgcggctgaggaggtcggtatcgttcggatactgctcctgcaaagtcttgaggaaatagtcgttaatctcgaagataatctgcagatggcgcggcagaattttacccagcatatccaccggccaggtctcgagcgcttcgctcatcagggtgtggttggtataggagaagacctgacaggtcacctcgaacgcctcgtcccagctgaacttatgttcgtcgataagcagacgcatcagctccggtatcgacagcaccgggtgggtgtcattcaggtgaatggcaatcttgtccgccaggttgtcataggtcttatgcaacatgtaatggcgactcaggatatcctgcaccgtggccgacacgaggaaatactcctggcgcaggcgcagctcgcggccggagtaggtcgagtcgtccggatagagcacgcgggagacgttttcggagtggtttttatcctctaccgcggcgaagtagtcgccctggttgaatttaccgaggttaatttcgctactggcctgcgcgctccacagacgcagtgtgttggtggcgtcggtgtcaaagccggggatgatctggtcgtaggcttccgcaatgatctcctccgtctcaatccagcgggttttctttccttcctgctgaatgcggccgccgaagcgcactttatagcgggtgttgtggcgctcaaactcccacgggttaccgtactccagccagtagtcaggagactctttttgtcggccatcgacaatattctgtttaaacatcccgtagtcgtagcggatgccgtaaccgcgtcccggcagacccagcgccgccagggagtcaaggaagcaagccgccagacggcccagaccgccgttgccaagcccggggtcattctcttcatcgatcagctcttcgagatcgagccccatctccgccagcgcgctgctcacatcgtcataaatgcccagcgacagcagcgcattcgagagggtgcggccgatcagaaactccatcgacagatagtacacctggcgcacttcctgggagagctgcgcgcggttggagcgcagccagcgctccaccatgcgatcgcgaacggcaaacagcgtggcgttaagccattcatgcttgttggcgatggccggatctttaccgatgataaacatcagtttataggcaatagaatgctttaacgcctcaacgctcagcgtcggtgatgcatagctaaagggtacattcataacaatgactccagtggttacatcaagcgttgataaagttcgcgataggagttcgcggcaacctgccagctaaaatccatattcatcgcctgacgctgcacgtagcgccagagcgacgggcgcgaccagaggacaaaggcgcgacggatagcgcgcagcaatgacagcgcattgctgtcctcaaagacaaaccctgtcgccagaccatcggccagattctccagcgaactgtcagcgacggtgtccgccagaccgccggtgcggcgcaccagcggcagcgtcccgtacttcagaccatacagctgggtcaggccgcagggttcaaagcgactcgggaccagaatgacgtcggcgccgcccataatgcggtgggagaaggcctcatggtagccaatctgcacacccactttgcccgggtgttcggcggcggcggcgaggaaaccttcctgcagcaccggatcgccggcacccagcagcgccagctggccgccctgctcaagcagacccggcagcgcttcaagcaccaggtccagccctttctggctggtaagacggctgacgacggcaaacaacggcgctttatcatcgaccttcaggcccatggcaatctgcagctgacgcttgttctccgccttctcctccagcgtgtcgcgatcgtagcgcatcggcagcagcagatcgttttgcgggctccagataccgtcgtcaacgccgttgagaattcccgacagccgaccttcatgatggcgctggcgcagcagcccctccatgccgtaggcgtactgcggctcggtgatctcgcgcgcgtaggtcgggctcaccgccgtaatatggtcggcgtagtagaggccggccttgagaaacgagatctgcccgttaaactcgaggccatgcatgttatagaacgaccacggcagctcaatgtcattcatatgccaggagtaaaacatcccctggtacgccaggttgtgcacggtaaacaccgatttagccgggcgtccgcgcgccgccaggtaggccggcgtcaggccggcgtgccagtcatgggcatgcaccacatccgggcgccagaacggatccagtccgctggccatttcacttcccacccagcccagcagcgcaaagcgcaggacgttgtcgggataagcgtgctggttggtatcgtggtaagggctccccggacggtcatagagatgcggggcgtctatcaggtagatccccacgccgttaaagtggccgtacagcagcgtgatccgcccggcgaaggtatcccggcgggtcaccacctgggcatccaccacgccgcgacggatatcgggaaacgccggcaacagcacgcgcgtatcgataccctccgcgatttgcgccgccggcagtgcgccgatgacgtccgccagaccgcccgtctttaacagcgggaacatctcagaacatacatgtaagacctgcattagcgctcctgtttgtgccctaatttccgcagcatgtcgcgggtcaccagcacgataccttcctctgagcgatagaagcggcgtgcatcctcttccgcattctcaccaatcaccattccttccgggataacacaggcgcggtcaatcacgcagcgacgcaggcggcatgagcgccccacccagacatctggcaacaagactgccgaatcaatgttacagaacgaattcacccgcacgcgcgggaacagcaccgactgcaccaccaccgacccggagataatgcaccccccggaaaccagcgagttcagggtcatgccgtggctaccggagcggtcctgcacgaacttcgccggcggcagcgattccatatgggtgcggatcggccagttctggtcgtacatatccagctccggcgtgactgacgccagatcgaggttagccttccagtaggcttccagcgtccccacgtcgcgccagtaaggttcggcgttcgggtcggattgcacgcaggagagcgggaaaggatgtgcataagccatgccagcttcggtgatcttcggaatgatgtctttgccgaaatcgtggctggagttctcgttgcgatcgtcttcttccagcagctcataaagataggcggcgtcaaagacataaatgcccatgctggccagcgatttggtcgggtcggtcggcatcgccggcgggttggcgggtttctcgacaaactcaatgattttttcgttttcgtcgaccgccatgacgccgaaggcggatgcctcttcaatgggcaccggcatgcaggccacggtgcaacgcgcccctttttcgacatggtcgatcagcatgcgcgagtagtcctgcttataaatatggtcgcccgcgaggatcaccacgtactcggccttgtagcggctgatgatatccaggttctgcgtcaccgcatccgccgtgccgcgataccaattttcgccatgcacgcgctgctgagccggcagcagatcgacaaactcgttcatctcttcgctgaagaacgaccagccgcgctggatgtgctgcaccagcgtgtgcgactgatactgggtaataacgccgatgcggcggatccctgagttaatgcagttagataatgcgaaatcgataatacggaacttgccgccaaagtgaacggcaggtttcgcacgcttaatggtgagatccttcagccgggtgccacgcccgcccgcgaggatcaacgccacggatttgatgggtaattgacgcgccagcatcagcggatcgtttttttcaagcctaaccatgattaactcctttttacacccccgctttccagctcatcccgccgcgccgccgccacgggtccaaccgaaagcttcagggcttacgacctttgaaatacgcacactccgtgcgcgggcccatgccagacagccatgatgaccggattatcctctccggcgaatggaggaacggcgcgccattccccctcgggtaaaaccatatcgaccacctctgcggtggcgttcagcgtgagcagccagcgatccgacaactggatctgcatacacgcggccccctgctgccactccgcggcagtcaggggctgggcgttgcgattaagccagcggacgttgccatccccctcctgccaccagcggttgcgggtgagcgccggaatacgacgccgcaggtggatcagcgccgcggtaaaggcggttaatcccgggttcgcctggcgccagtccagccacgtcagggcgttgtcctggcagtaagcattattgttaccgtgctggctgtggccctgttcatcgcccgccagcagcattggcgtcccctgagccagcagcagcgtcgtcagcagcgcatgcgcgctggcgcgccgccgttcaatcaccgcaaaattcgcttctaatccttctataccatgattgttgctgtagttattgttagtcccatcgcgattctcctccccgtttgcctcattgtgtttctgattgaaacaaacgcagtcgcgcagcgtgaagccatcgtgggccgtcaccaggttgaccgtcgccgatggcggcttgccatcgcgggcaaagagatcgctggaggccgcgaaacgttgcgcaaaatcccccagggagacattttgctgtagccagaagcgtcgggcgctatcgcgaaaatggtcattccattcagcgaacagcggtgggaaattacccacctgatagccgcccgggccgatatcccaaggttccgcaatcagtttcacctgcgacagcacgctgtcgcggcggatagcctcgaacagcggcgcatcctggcggaattccggcgtccgccccatcactgaggcgaggtcgaagcgaaagccgtcgacatggcactcatccacccaaaagcgcaaacactggcgcgcccactccaccacgccggggtggctaagattgagcgtattaccgcacccggtccagttgtgataatcgccatcctcccttacccaataatagctacggttgtcgattccgcgcagggagacggtgggcccttcgagatcgatttccgcactatggttgagcacgatatccagaatcacttcgataccggcggcgtgcagcgccttaaccgcatcgcgaaactcatccagggcgcgatccgggtcgctggcgtagcgcggatccagcgcgaaccacgccaacgggttgtagccccagtagttgcttaaccccatccgctgcagtcgcggctcgctggcgaactgcgccaccggcaacagctcaagggcgctgatgcccagcgatttgaagtaagcgatcatcgccgggtggcccagcgctttataggttccgcgaatggcttccggtagctgcggattaagcaaggtgagccctttcacgtgcgcttcataaatcaccgtttccccccatggggtacgcggcggtttatcgccacgccagtcatagcgcagatccaccacctgcgattttggcgcgaccgcggcgctgtcgcggcgatcgggctgccacatgccgccgtgcaggcgctcatcgtcaggcagatcgccctcgacccggtgggcgctgggatcgatcaacagcttggccgggttaaagcggtgcccctgcgccgggtcccagggaccatgtatccgatagccgtagcgcaggcccggcccggcggcggccagccagccgtgccagatgtcgccgctgcgcgccgggagatcgaagcgttgctcgttgccctgctcgtcgaatacgcacagctccacccgctccgcatgggcggagaagagggcgaaattcacccccttgccgtcatagctggcgcccaatggcgcaggtttgcctgccgcgagtgaggtcattgcgcctcccggaccagccagatcgtcgccagcgggggcagggtcagcgacagcgaatgttcgcggccatggctggcgatagcgtcgctttccaccacgccgccattgccctgattgctgccgtgatagtgcatggagtcggtatttagcgcctcgcgccagcggcccggctggttaatgccgaagcggtagtcgtggcgcggcaccggcgtgaagttgctggcgacgataatctcgttgcccgcccggtcacggcgtacaaagacaaacaccgagcgctcatggtcgtcgaccaccagccattcgaagccgtaggggtcaaaatccagctcgtgcagcgctttatgatgacggtaggtatggttcaggtcgcgcaccagccgctggacgccgtggtgccagttgtcgccgccctccagcagatgccagtcgaggctaacgtcatggttccactcgcggccctgagcgaactcattgcccataaacagcagctttttccccgggaaggcgaacagccagccgtagtaggcgcgcaggttggcgaacttctgccaggcatcgcccggcatgcggtcgagaatcgattttttgccgtgcaccacttcatcgtgggagagcggcagcacaaaattctcggtgtagttgtagagcatgccgaaggtcattttgtcatgatggtagcggcgatgcaccggatcgagcttcatgtaatccagggtgtcgtgcatccagccgaggttccatttgaaccagaaaccgaggccgccgccggctggcggacgggtcaccccggcaaaatcggtggactcttccgccatggtgaccgcgcccggcgtctgttcgccaaggatgcggttggtgttgcgcagaaactcaatggcttccagattctcccgcccgccgtattcgttggggatccactctcccgccttgcggctgtaatcgcgatagatcatcgaggccaccgcgtcgacccgcagcgcatcgatgccgaagcgttcgatccagtacagcgcgttacccaccaggtagttgctgacttcccgacgtccgtagttgtagatcagggtattccagtcctggtgatacccctcgcgcggatcgctgtgctcatacagcgaagtgccgtcaaacgaggcaagggcaaaatcatccgccgggaagtggccgggcacccagtcaagaatgacgttcagcccggcggcgtgcgcggcattgataaagtaacggaaatcgtcgcgggtgccgaagcggcgggtcggcgcatagagcccggtgggttggtagccccagctgccgtcgaacgggtgctcgttaaccggcaatagttcgagatgggtgaagcccatccatttcgcatagggcaccagctggtcggccagctcgcggtagctcagccagaaattattatcggtatgacggcgccaggagccgagatgcacttcatagatagagatcggggcatcaaactggttcgccgctctgcggtccgctggctgttccactttgggcggcaggtcgcagataagcgaggcgctttccggacgcatttgcgactcaaaggcgtaagggtcggctttgacccgcagattgccgtgggcgtcaatcagttcgaatttatacagctggccattatgcgcgccgggaacgaacagctcccagatcccggactctttgcggaatcgcatcgggtggcgacggccatcccagtagttaaactgccccaccaccgatacgcggcgggcgttcggcgcccacaccgagaaacgggtaccggtgacgccgtccatggtggcagcgtgcgcgcccagcgtttcataagggcgcaggtgggtcccttccgacagcagccagacgtcaaggtcctgtaacagcggaccaaagcgataagggtcatcgatcagattctgctgcccgtgccaggtgacggccagctgatagcgaaaagcgtttttacgccgcggcaggacgccgctgaagaaaccacgcgagtcgagacattcgagcttgccgactttgcgtccggttttcggttcaataacccacacgtcggtggcatcgggtaataatgcgcgcacttccagcccggcgtcagtacggtgcatgccgagcacggaaaagggatccgcgaaatgaccggcgattagcgcattaatcacgtctctatcaatatgattagacatgctttcatcctgttgtaagtgtcgctcattcctgtaactggcgactttttttgacctgaacggcgcagtgctctcagcatcctcctgctccgtcccaccttcaggtaaggaattccttacttaaagcatagccaaggctgagttacctccgtggggaaaaatctaacatccgcgtttactccttgtattacgcaaaaaaaaagggggcttgaagaccccctttctgttcatcctgggcttacgccagctggcgaagcatccggcgcagcggctccgcggcgccccacagcagctggtcgccaacggtaaaggccgatagatactccggccccatattcagtttacgcaggcgtcctaccggggtggtcagggtgcccgtcaccgcggctggggtcagctcgcgcatggtaatctcacgatcgttcggtaccactttggcccacgggttgtgcgcggccagcagctcctcaacggtcgggatagaaacatctttcttcagcttgatggtaaacgcctggctgtggcagcgcagcgcgccaacgcgaacgcagaggccgtctaccgggataacggacgaggtggcgaggatcttgttggtctccgcctggcctttccactcttcgcggctctgaccgttatccagctgtttgtcgatccacgggatcaggctgcccgccagcggtacgccaaagttatcgaccggcagctcgccgctgcgggtcagcgacgtcactttgcgctcaatatccaggatggcggaagccgggtccgccagctccgcggccacatgattatgcagctgccccatctggctcagcagctcgcgcatatgacgcgcgccgccgccggaagccgcctggtacgtcgccacgctgacccactccaccagatcctgagcaaacaggccgccgagggacatcagcatcaggctgacggtgcagttgccgccgacaaaggttttcacgccgttgttcaggccggcggtgatcacgtcctggttaaccgggtcgaggataatgatcgcatcgtccttcatgcgcagcgaagaagccgcgtcaatccagtaaccctgccagccgcttgcgcgcagcttcgggtaaatctcgttggtgtaatcgccgccctggcacgtgacaataatgtccagcgccttcagcgcgtccagatcgaacgcatcctgcagcgtgccaccggtgctaccgccgaatgacggcgctggctgtcccagctgggaggtagagaagaacaccgggcgaatggcgtcgaaatcgcgctcttcaaccatgcgttgcatgagaacagagccgaccattccgcgccagccgataaaaccaacatttttcataacgtattcctgcgaggtgtgtgctgtttgtgcctggccagtttccaactggattatccctcaccttacaaaatgcagctaaagtcgcaagtgaaattaatcaatgattgctgaacaatcagaaaagcaacttatcctgcacattgtccaccgtcgctggtcgtcgtcaaaagcgcaacgattatcggggaaatcccccggggaatggaatattttccgtcgctattttattgatcctgattatggattaagcgtgaaatctggtgcttttccgcttgccaaaaaaaagcgacaaacccagtcacagcaagggatgacgagggatacgagcatcgtcgtagcgctaataagggccaatagctggcaaggaaaagagggaaaaagggcggtttattgcaaagaagccagggtaagcagcgttaccctggctttttatttcccgcgagcgggagatgagcgggcttagctcagcagctggaaggcgatcataccgacaatcgccccggtggtgccaaggatggtttccatcatggtccaggtcttcagcgtctgggcttcactggcgccggtaaatttaccgaacagccagaagccggcgtcgttcacgtggcttaccacaatcgagccgccggcgatacagatagacaatgccgccatctgcgcgccgctgtagttcagctgctcaatcaccggcatcaccaggccgaccgccgtcaggcacgccacggtggcagagccctgaatgatacgcaccgccgccgccagtacgaagcaggtaatagcgatcggcagccccattccggtcagcgcttcaccaagcgccgggccaacgccggagtcaaccagcacctgcttgaagacgccgccagccccgatcaccagcagaataatcccggccggctgcagcgcgtggccgcaaatctccatcacccggtctttcgccattccctgacgtaccgccagaccgtaaatcgccaccaggcaggccaccaggatcgcggtgaacgggtggccgataaactcgaaccattcgtaggcagtggaacccaccggcacaaagcgcgcggcgatggttttcaggccaaccagcaccagcggcagcaggatcagcgccaggctgaagccgaaggagggcattttgccttcgccgagatgcggttccgtgacgtcgtcaggaatatgcaattcgacgtagcggctgatgaagttgccccatagtggaccggcgataatcatccccggaatggccgcgcacaggccaatcaggatcatccagccaaagtcggcgtgcatttgcgacgccagcagcatcggcgccggtccaggcaacagaaacgccgcggcggcggcaacgccggcaaacagcgggatcaccagcttcacgaggttagtaccggtatggcgcgccatcgagaaggcgacgctaatcagcagtacgatcgccacttcgaagaacagcggcagcgcgcagatgagaccggcgagaccaatcgcatagtgcgcgcgattgtggccaaaggatttgagcatcttgacggcaatctgatcgaccgcccccgtttcatgcaggatcttaccgaacatcgcgccgagcgcgacgacgatcgccaggaagcccagcgtaccgcccatccctttctccatcgtcgccgcgattttatccagcggcatgccggagaagagaccggcgccaatagaaaccaccatcaaagccacgaaggcgtgcattcgcgccttcatgactaaaaacagcagcagcaataccgagccgactgctgttaaaacaagcgttaaagtactcactagtgactgcctttgttgatcacctcgatggtgctggccaccacgccttccagcggctggtcgatatcgacgataagcacatcgctctcgtcggcgcctggttcctgcagcgtttcaaactgcgtcaccaacatttgggttttaaagaagtgccctttacgcgccttcagacggctttcgatcacgtcgaaatcgcctttcaggtagatgaaggagaggttcggattgcccttgcgcagaatgtcgcgatagctcttcttcagcgccgagcagacgatcagcgacaccttgttggtacgctgcatggcgaacgcggcgtcatttagcgcctgcagccacggcgtgcggtcgtcatcgttgagcggctcgccggaggccatcttggtgatattgctgcgcggatggagaaagtcgccgtcaagaaacgcggcatgcagttgatgcgccacttcgctggcgacagcggattttccgctgccggaaacgcccatcaggacatagacgtggtgatcatggttagtcgtgctcaaagcgtcctcccactggactggtacgccgcgccggggctgactcatccagcgcgaaggcggcgtatcggttaattgttacgggtaactgttatcggtaacattgtcatgccggacctgtggagaagcaatatccattcgtgccagatgtgaatatgtgtgatctacttcaaacttgtcagtttaaattgatccgcccggtgacaatgtgaaacctaaatctaacatcttaggggtaatcgcttcaccacgaatgcgcgccagcagccgttcggcgccgatgcgccccattcgctcgcgcggggtcaggacgctggccagccgcggctccatcacctggccgatatcatggccgtggaacccggcgatcgccatatcatcggggatcttcagccccagacgctggcactcgaacgccgcgccgaccgcgaggtcatcgttggtgcagaaaatgccgtcgagctgtggatattcgcggcgcgcctggcgcatcagctcaatccccgaagaataggacgaggattgctccaccatcacgctgtagggcgtcatcccggcgtcaagcatcgcctgctcgtaccccttctgtttgatgatagtacgttcatcaagacgcgcccccagataggcgacatggcggtggccgcgggcgatgatcgccgcggtcatctgccgggcggcttcaaagttatcaaacccgacggcaatatcgagacacggcgaccggctgtccatcagctccaccaccggaatgccagcgacttcgatcatcttcagggtgcgcggcgtatgggtgcgttcggtgaggatcaggccgtcaatgttccaggagagcatcgattcgaggcgtttctcttccatttccggcttatagccgtagtgcgccagcatggtttgatagccgaaggcgtcggtgacgctttcgataccgcgcagcacttccgagaagacctggttggttaacgacggcagcagcacgccgatggcgcggctggtggcgttggaaagaatgtcaggggcgcgattgggaatataacccagttcatcgagggcaacggcaatcttgccacgcagcgcttcggagacctgctccgggttgcgtaaatagcgactgaccgtcattttggtcacgccgacaagatcggctacatcctgaagtacgggtcttttctttttcatcgtcctgactgtgatcaacgggaaacattttctcagtttatcacggacaaagcgcaaccttccctaacatgagggaaggctgcgcaatttatttaacctggctcagataactatcaaaccggcggcagatcgaacagcaggatctcgctatcgctgtcggcatgaaccgaaatcgcctgctcgtcccagatggccaaaccgtcgctggtggtggctttagtaccgttgatggtcacttcgcctttgaccacctggatccacacgcggcgttccgcggcaatctggtgaaccgactgctcatctttcagcagcgcccagcgatagagttccatatcctggtacaccttcagcgagccatctcgcgcatctggcgacagtaccagctgtttgccctgggcggcgtcgaagcggcgctgctcgtagcgcggggtaatgccggtttcttccggaataatccagatctgatacagacgcagacgatcggttttgctcgggttgtactcagagtggcgcaccccggtacccgcgctcatgatctggaactcgcccgccggcacctgctctttgttgcccatgctgtcctggtgctccaccgccccttccagcacataggtcaggatctccatgtctttgtgcgggtgggtaccgaagccctgaccggcgtcgatgacgtcgtcgttaatcacccgcagggcggagaagcccataaagttcgggtcataatagttggcgaaagagaaagtatgccaggaatccagccagccatggttagcgtggccacgttcgttcgctttgcgtaaatagatcatgttgcacccccgtatgttgtcgatggagtcagtgtggacccatttcgccggcgatcatagagggtgaaaattgactcctctgttcaaaaaatatgaacaagcgcagaggagccaatttgacttatcgggtaagggtaatggtggccggtgaaggctgctcaaagccgcgctgcaggatctccatattggtgagaacgtcagtttccttgacgtaattcggctggccgttgacgagggtgtcgtacagcgcgtcgtacacccgaccataatcgccgctctccagcggcaccgcttcgcgcaccatctcccctgcctcgttgacatacaccagctcgccaacgctgtcgtccgcgccaaatcccggctcgcccggcatgatattggccttcaggctggtctcctgctggtcaatgccgtacttcacaaacgaacctttgtgcccgtgaacgataaatttcgggtaatcgatctgcaccagatggctggtcttaacgatggccttcatatcgccgtagaacagctgggcttcaaaggtgtcatccgggttggctttattgcgcagcgagcgcagatcgtaagagacatggtccgggcggccgaacagcgaaatgatctgatccagggtatgcacgccaaggccatagaactcgccgttttgcggaccgccggggttggtctccgccagtgggcggtagttatcaaaatgactttcgatctccaccagttcgccgagtttcccgctctcaatcacctttttggtggtcaggaagcaggagtcgaaacggcggttctgatagggcgtcaccgtcagacctttgctgttcgccagggcaaacagagtttttgcttcctccagcgtcggggtgaacggcttttccaccagcacgtttttccccgcctccagcgcctttttcgcatattcaaaatggctgtcggcgtgagtgcagaccaccaccagcttgaccagtggatcgtttaatacttcatcaaggtcgctggtgaaatgaatatgggaatactgcggcgcctgctcctcgggcttcgcccggcggcggtaaatgtgcgctacctgccagcggtctttgcggtgcaaaacgtaaggaaggtgatagcgggtggtgcttttaccaaagccaataaatgcgcagtgcagagtcataacgctgtccttagttaatgagctaccttcaaccatagcgcaagccggtccctcacttcatcctctctgttcgcttgcagtgaagattcgttaggaaaatagttcgagtatcactcatacgtaattattaataacttattgattaataagtgattaaatcagcagttttcggcaaaaaaccttgatcgccatggcaaaactgcggataagtggagagcaaaccaggaggttgctgatgactaacggagtagccagccgctgctgatggacaaacagtatctcgccataaacggcgccctttttttctggcttctcgcgctgatcgcctggtctgtcgatgcaagcgcgctggcgcgcctggcggccgcctgcgcgcttatcgctttcctcctccatagccaacggaacaagattaacgcgatgtttattaagaaaaataaaacggaacctcagatatcagaagcagccacgcctccggcaattaacccagaacccgaagcggtcgccagcaaaaaacacgagactacggtcatcgccagcggggtgcatttcgtcggcaatatagtcgccagcggccatgtctatatccacggtcaggtcaccggcaacattgaggccaaagagcatttgattaaggtaatgcgtgaaggccaggtggagggcaacgtcagctgccgggagctaataattgacggcaaggtgcagggccagtgtcatggcgacagcatcaccatcgaggagcacggccatctggagggtaccctcgcctatcgcgcgctggcgatcaagaaaggcggcgtttttagcggtcgcgctgaactgctggccgccgcggagaacaaaagtcatattctcggtctggtagtagacgcaccctccaaaaccgacgcggagcccgtcaggccgcagagcgcctgagatagcagcaaaaaaaaagccagcacccggctggctaaagtaatactggaagcaatgtgagcaatgtcgtgctttcaggctttccgcaagggtctccctgaatgcaggacaataataatcattctcattcgcacttgtctacttttttttgcaaataatgcgtgttgactcgaacgccgtagtcagtgatgtttaaagggacttttcacctgaatgaggaacaaggaatgagtgacatcgtgatacgccatgctgaaccgaaagatattgacgcgattcgtcaaattcacgcccagccggaggtgtatcacaacacgctacaggtccctcatccatccgaacatatgtggcgggagcggctaaccgatacgcccggcgtgaagcaactggtggcctgtatcgatgagcaagtcgtcggccatttaagcattgccgtcgtccaacgtccccgccgtagccacgtcgccgattttggtgtcagcgtggattcgcgctggcacaaccgcggcgtcgccagcgcgctgatgcgtaccatgattgatatgtgcgacaactggctgcgcgtcgagcgtattgagctgacggtgttcgccgataatgccccggcgattgcggtgtataagaagtacggctttgagatcgaaggcaccggcaggcgttacgcgctgcgcaacggtgagtatgtggatgcgtattatatggcgagaatgaagtagcgtgttgccgggtggcggcttcgccttacccggcctgcgttcgtgcagttgtaggcccggtaagcgcagcagcgccaccgggcaacacatcaataccccgccgttaaatcatccggcgaacgcggatcggaggcgccatacagcatgccgtccggtcccaccatgatgctctgggtactgcccatcgcctctttcagcgccactttctgccccttcgcctccagcagcttgagggtatccgggctaaagcctttctccacccgcagctcatccggcagccattgatggtggaaacgcggcgcgttggtggcttccgcgacgttcatcccgaaatcgatggtattgaccaccatctgcagtacggtggtgatgatccgactgccgcccgggctgccggtcaccagccaggttttgccatctttcaccacaatggtcggcgacattgacgacagcgggcgttttttcggctccaccgcattggcgtcgccgcccaccagaccatagacgttaggcacgccgggcttcgccgagaaatcatccatctggttattgagcagaatgccggaattaccggccacaatgccggtaccgaaggtcgtattcagtgtataggtcaccgccaccgcattgccgtctttatcgaccaccgagaagtgggtggtctggttgctttcatagggcgccagcttgcccggacggatctggctggaaggcttcgccttgttgacatcaatctcggcggcgatcgctttggcgtaagccttgctggtcagcgcctgccacggcacgttgacgaagtcagggtcgccgagatattcagagcggtcggcgtaggcgtgtttctctgcctccgccatcacctgcatggcgtcggcgctgccaaaaccatatttctgcatatcgaagttttcgaggatattgaggatctgcacgatatggatcccgccggaggacggcggcggcatagagtaaacctcatacccgcgatactcgccgctaaccggcgtacgctccacggccttatagccggcgagatcggctttggtgattagcccgccgtgctttttcatctcgtcagcgatctggtcggcgatggcccctttatagaaggcgtccgggccgtgctcggcaatcagctccaggctcttaccgaggttcttctgcaccagccgatcgcccttcttcagcggctcgccgttcttccagaagatcgctttactattttcatgctgcgggatcacttcgctgccgtaggtcttcagatcgtccgccagcgcatcgttaacgataaacccctcttccgccagcttaatcgccggacggatcactttgttcaacggcatggtgccatacttttccagcgcgagggagaaaccggcgacgctgcctggcgtgccggaggccagatgcgaagtcagtgattttttactgtccgggttgccctggtcgtcaaggaacatgtcgcgggtggcctgctctggcgccatttcgcggaaatcgatcgccgtggtcttgccgtctttagtccgcagcatcataaaaccgccgccgccaatattcccggcctgcggatgggtgaccgccagcgcgtagcctaccgctaccgccgcatcgacagcgttaccgccctggcgcaggatatccacgccgacgcgggtcgccagcgcgtccaccgaggccaccatcccctgccgggcgcgtaccgggtggaacacatcttcctctacgccataagagaccggcggcggtggcggattggcggcgacggtaaagctgccccccgccagcaacgcagcgatgaccacctgacgccatattgttgtttttatcattgtcttactcctgaaaggtaggtttcattccccgcttaagcctggttgataactcctaaaaaatcattgttatggcagattcgaggtacacttaagtgatcccacgcacgggaggagaaaaccatgaaagcgattctgtttctggcggcgctgatgccgcttggcgtattagcccagccgatcaatattaataacaaccctaaccagccgggttacgtggtccccagccagcagcgcatgcaaaatgagatgaaggtgcagcaacagcagcagcagagcatgctgaagcaggatctgaacaatcagacccgctcgcagcagcagcatttgcaaaaccagctgcagactaatcagcagcgcgcggcccagggcggcaatctgaatgcgccgcagcaggtgcggccaaataacaacggtggaatgctgcggcagactaatccgtaaaggtcgtccgccgcaaatccgtcttaaggctggaaattcggcccgataacatcaatggcatcggtgcagatgcagtctacgccccagcacagcagttcggcggcgcgctggggtttattgaccgtgtacaccagaatgtgcaggccggcctgtttcaggctcgccacccgcgccgcatccagcagtttgtgattgaggtgaatcgacacgcagcccaaccgggtggtcaattcgcgccagtcatcgcgccactcatccagcagcagcccgcgcggcagctcgggcgcggcttcttgcgccgcctccagggcgtcgatttcaaaagaggagagcagcggcgcggtcatgccttgccatagatcgcgcgcggccagcgccaccactttcccggtctgcggccccagcccggtggtcggcttaatttcgatattcgccatcatgccgtggcgacggcagcgctccgccacctgggagagcaacggcagcggctcgcccttaaattcacggctgaaccagctaccggcatcgaccttcagcagatcgtcccacgccagctctcccgccacgccccagccattgctggtgcgttcgagattatcgtcatgcagcagaaagatctgcccgtccttcgacagcttggcgtcaaattcaatcatcgtgtgcccgtagcgggcgccgacgtcgatagccgccagggtgttctccggcgccagtttaccgccgccgcgatgggcgacgatgcggggataaggccagttactcatgcgcgttgtcctgtttcaccatcaaagaggtgcagatgttccaaaggcagatgcagccatagcgtgctgcctgccgccgggcgctgctggtgcggcagtctgaccaccagcttctgttcgccccagcgcccgtgagcgaggttatcggcacctaaaatttccagggtgtccatcagcagcggaataccaccttgcgcctgcgagcttaagataaaatgctccggacggataccgagcgtcattttacgcccagcgtggcgccggtgctcatgattcgtcggcagctgcatgccgcccgccagctcaaagcgaccgccgtcatcgctgatgcgcccttccagcaggttcatggccgggctgccgataaagctcgccacaaagcggctggctggcttctcgtacacttccaccggggtgccgatctgctcggcaacgcctttgttcatcaccatcacccgctgggcgagggtcatcgcctccacctggtcatgggtgacgtacagcgaggtggttttcaggcggcgatgcagctgctgcagttccagacgcatctgcacgcgcagcttggcgtcgaggtttgacaacggttcgtcgaagaggaataccgccgggtcacgcacgatggcgcggcccatcgccacgcgctggcgctggccgccggacagttcccgcgggcggcgcttgagcagaccatccagctcaagaatgcgcgccgcctcctgcacccgctcggcgatcaatcccttacccatgccgcgaatcttcagcccccacgccatgttctcttccacgctcatatgcggataaagggcatagttctggaacaccatcgcgatgccgcgatccttcggctccatctcggtcacccgtttacgatcgatccagatatcgccgctggtcacccgttcaagtcccgcgaccatccgcagcagcgttgatttcccgcagcccgacgggccgaccatgacgataaattccccgtccgccacgtccagcgtcaacggttgaattacctgggttttgccatcccagcttttgcttactgcctgtagttttaaaccagccattttatttctcactatcgaccaggccgcgcacaaacgcgcgctgcatggctaaaacgatgacgaccggcgggatcagggtcagcagcatcgccgccatcacctgattccactgggtagtaccttcgccggtggcgatcatgcctttaataccggcgacggcagtgccaagattcacatcctgaataatcagcaacggccacagatactggttccagccgtagataaaggtgatgacgaacagcgcggcgaggttggttttcgacagcggcagcacgatgtcgcgaaagaagcgcatcggcgaagcgccatcgatacgcgccgcttcaatcagctcgtccggcagggtcataaagaactggcggaacaggaaggtggcggtggccgaagccatcaacggcagcgttaacccggcatagctgtcgagcatgttgaggttggcgatcacctccaccgtcgggaaaatacgcacctcgaccggcagcatcagggtgataaagatcatccagaagaacaggttacgcagcggaaagcggaaccagacgatggcgaacgccgaaagcatcgacaccacgattttgccgaccgtaatggcgaacgccatgatgaaactgttgagcatcatcagccagaacggcgcgctgttgacgccgacgccgttcacccagatggtcttcatgttctccagcagatggccaccggggatcagcgtcatcggcgtttcaaataccgatttgttatccagcgtcgccgccacgaaggcgacgtacagcgggaataaaatgacggcgatacccaggatcagcatggtgtggctgaaaatcgtcagcccgcgacggttctcaatcattggtaacgcaccttactttcaacgtaacggaactgcaccaccgtcaggataatgacgaggaacatcagcaccaccgactgcgcggcggaagcggatagatcgagcccggcgaaaccttcgcgatagattttgtagatcagagtggtggtcgcctgcaccgggccgccagcggtggcggcatcgatcaccgggaaggtgtcgaagaaggcataaaccaggttgaccaccagcaggaagaaactcaccggcgcaatcagcggcagcgccagcttaaagaagcgacgaatcggcccggcgccgtcgatggcggcggcctcaaccagcgaacgcggaatcgactgcagcgcggcgaagaagaacaggaagttgtagcttatctgcttccacaccgaggcgaagaccaccagaaacatcgcctggccgctgttctgcgcatggttccagtcatagcccagctcgccgaggaaatgggtgatcagcccgcgcccggggttaaagaggaagatccacagcaccgccgcgacggcgggggccacggcgtacggcagcagcatcagcgtttgataaaagcggctgccgcgcaccacatagtcgaccagcgcggcgaaaaacagcgaaatgagcaggccgctgacggtcaccagggcgctgaattttatggtggtccagaacgagtccaggtagtacggatcgtggaacagcgcaacgaagttatccaggccgacgaactggctggaaaggccaaagggatcgacgctctgcagcgagtaccacagcgcttcgcctgcgggccagataaagaaaatcagcgtgataatcagctgcggcgcgaccagcacatagggcagccagcgcgagcggaataccggacgggatgatgacattgagattgggttcctgaacaatgccgggtggcggctacgccttacccggcctacatagggcacatcgtaggcccggtaagcgcagcgccaccgggcaagttacagattacgatttggtcgcttgctcgaagcgacgcagcagctggttcccgcgctgcacggcggaatccagcgcctgctgcggggttttcttgccggtccacacgctctccagctcttcatcgacgatggtgcggatttgcggcatgttgcccaggcgcagacctttggtgaacggcaacggcggcttgttcagcatctggcgggtagcgatatcggcgcccgggttcttatcatagaagccctgctgacgcgtcagatcgtaggccgcggtagtgatcggcaggtagccggttttctggtgccactcggcggcgttttccggtttggtcaggaagtcgaggaacttcgccacgccggtgtaggtctctttgtctttgccctgcatcacccacaggctggccccgccgatgatggcgttctgcggcgcgcctttcacgtcggcatcgtaaggcatcatgccgacgccgtagttaaatttggcgtactggcggatatcggccagcgatccggacgaggcagtggtaatggcgcagtcgccgttatagaacttttcggtagactcgtctttacgcccgaagtagctgaaatcgcccttcttgttcatctcttcgagcagcgcgatatgcttcacctgctccggcttgttgaactcaagaaccgcgtcggtaccgtcgaagccgttattcttcgtggccaccggcagaccgtgccaggcgctgaagttttcaatctggatccagccctgccagccgctggcgtagccgcacttcatcccggcggctttcagcttcgcggtgtaggccgccagatcctgccaggtcttcggcggctgctccggatctaagccggcttttttgaaggcgtctttgttgtagtagagcaccggggtagagctgttaaacggctgggagagcagatggccggttttcgaatcggtgtaatacccggccaccgtcggtacgaactgcgattcatcaaacttgatgcccgcctcgctaaacacctggtagaccggcttaatggcttttgacgccatcatggtggcggtgccgacttcatacacctgcaggatagccggcgcgttgccggtacggaaggcggcgataccggcgctcaggctctgctcgtagttgcctttgtataccggaacgattttgtaatcaggattggccgcgttaaagcgttgcgccagagaatccacttctttacccagctcgccttccattgagtgccagaacgggatggtggtaaccgccagggcctgaccggcaaaagccaggctcagcgccagtcctaaagctgtatgtcgtaacgatatcatcggttatctctcttgttgtgccggatgcgcgatttcacgcgttttatgctcgcggggtaacatgacatgttcgaattacagaaaaataacttttttattacaaaaaaaagatagtaacgggtcagagagatgacaagccgatgaaaggacgggggaagtaaagtgggagctgagacacggataatattcgtgcggtcggctcccggggtcggcgcaagcgcctcgcccgggctacaaaccggcgaagccgccgggttgcaacgagttaaccgtcatccgcgcaagcgcgcgacaatctgttccagggtaagttgccctgctgccgcctcgacggtcatgccgacgaagtctggattcgccggcaatataattccatttcgctttaaaaaaagcagagtgataaacagtgccgtacgcttattaccatcattaaatatatgaccgcgagaaatcgccagcagatgcatcgcagcgagtcgccacacgtctgtcacaccttcatattcaattttgtttagcaccctatacattatcgcttcggcacgccccggatcgggcataccggcaacgccaggcgtgacgcggagcagcctgtcgtgaaactgtattatctcttccgctgagataatctgcagcgtcatttatccgcaagctccctgatctcatcaccatgaaccgccatgatagccgcgaactcatcatccattctggccgtctggtagcgttcaaactcttctgcactaatgatgactgcagatttatgcccacgacgggtaatggtcacaggtacacctgtcactgcgctttccagcacatcggccagattttgccgggcttcgctatagttaaccgttctcataaaaacctccaaagctgtactcttttattgtacaacatacatgtacaaaaaaagagccaacaggctcttttaaatgtattcgtgcgatcggctcccggggtcggcgcaagcgcctcgcccgggctacaaaccggcgaagtgaacgacgccgggttgcgatgaattaaccgccgagataggcgctgcgcaccgcctcgttggccaacagcgcgtcgccggtgtcctccagcaccacgtggccgttctccagcacatagccgcggtcggccagcttcagcgcctggttggcgttctgctcaaccaggaagatcgtcattccctgctcgcgcagctgctcgatggtgtcgaaaatctgctgaatgataatcggcgccagccccagcgacggttcatccagcagcagcaggcgcggttggctcatcagggcgcgaccgatcgccagcatctgctgctcgccgccggacatggtgccggcgcgctgaatacggcgttcatgcagacgcgggaacagctcatacacccatttgatgcgggtctggaactgatcgcggtcggcaaaaaaaccgcccatcgccaggttctcttccaccgtcatacgcgaaaagacgcgccgcccttccggaacgatcgccaccgcctcgcgcatgatcttcgcggtttgccagtcggtaatatccttaccgtcaaagacaatgcgcccgctggaggcgcgcgggtcgccgcacagcgtgccgagcagggtggttttccccgcgccgttggcgccgataagcgtgacgatctcgccctgtttgatatgcaggctgacgttgtgcagcgcctgaatcttgccgtagtgggcgctgacgttgtcaaaagttaacatcgcgttttccatcttatgcctcaccaaggtatgcgcggatcacatccgggttattacgaatctcttccggcgtcccgttggccagcggtgttccctggttcacgacgtagatgcgatcggaaatgcccatcaccagcttcatatcgtgttcgataagcaggatggtggtgttgtgatggttacgcagctcggcgataagctcgtccagctctttggtctctttcgggttcagccccgccgccggttcatcgagcatcagaatttccggctgggtcaccatgcagcgggcaatctccagccgacgctggtcgccgtaggccaggttgctggcctgacggttggcatgctccagcaggccgatgcgctccagccaggtggcggccctgtccagcgcttcgctctgcgcccgacggaaggccggcgttttcagcaggccggagaagagcccggttttcagctgctgatgctgcgccaccagcaggttttcaatcaccgtcatttcgcggaacaggcgcacgtgctggaaggtccgcaccacgcccatccgcgcaatctgctgacccggcagcccttccaggtgctggtcgcgcagcagaatagtgccgccggtgggcttgtaaaaaccggtcaggcagttaaagacggtggtcttcccggcgccgttggggccgatcagcgagacgatctcgcgctctctgagctccagcgacacattgttgacggccagcagaccgccgaaacgcatcatcaggccgctaacggataataatggctgactcatgcctgctctcctttcgcctgaccgtttttcagcttcaactgcacgcgcgtcattggcagaagcccctgcggacgccagatcatcatcagcaccatcaggccgccgagcattaacatgctgtattcgttgaagtcacgcatcaactcgcgcgagaccaccagcagaatagccgcgaggatcaccgcgaactgcgagcccatcccgcccagcacgacgatcgccagcacaaaggctgactcggcgaaggtaaaggattccgggctgacgaagccctggcgcgcggcgaacagcgtgccggcgaagccagcaaacgcggcgctgatggtaaaggcagtcagcttgatgcgcgtcgggctcaggcccagcgaacgacaggcgatctcatcttcacgcagcgcttcccacgcccggcccagcggcattcgcagcaggcggttgatgacgaacaggctgagcactaccagcagcaacgccaccaggtagaggaaaatcacccggtcggagggatcgtatttgacgccgaagaagttgctgaaggtatcccagccgccttcgcgggcgctgcggctaaattcgaggccaaagaaggtcggtttcgggatctggctgataccgttcggcccgccggtgatctcggtattgttgagcagcagaatgcgcacgatctcgccgaagcctaaggtcacaatcgccagatagtcgccgcgcaaacgcaacaccgggaagcccagcaggaaaccggccgccgcggagaccaggccggccagcgggagacaggtccagaagccaagaccgtaatagtggttcagcagcgcaaaggtatacgcgccgatggcatagaacccaccgtagcccagcaccagcaggccggaaaggccgaccaccacgttcaacccgaggccgaggatgatatagatcatcgtcagggtggcgatatccaccgtgccgcgcgacaccataaacggccaggccacggcaatcaccagcagggcgatcaggaacagcttctgcttcaccgtcgacccgtcaatcgccggcataataaacttcggcccggagacgttcttaaccgctttctggaacagcggccgcagcagctggaagaaaaagaccaccgcggtaccgatgaagatccactgccagcgaatatcggcggcggtatcgaccaccagtttggtgccgttcagctccagctgcacgcccataaagacgcccgccagaatgaagaacatcacggcagagagcagcgccattgcaatttgcatcggtttcatactttttccacctccgggcggcccagaatgccggtcggcatcactaacagcaccagaatcagcagcgcgaaggaaacgacgtccttatattcggtgctgagataggcggaagagagcgcctcggcaatacccaggatcaggccgccgatcatcgcgccagggatactgccgatcccgccgagcacggcggcggtgaacgccttcatcccggccataaagccgatgtaggggttaatcacgccgtagaactgccccagcagcacgccggccaccgccgccatcgctgcgccgatgacaaaggtcagggcaatgacgcggtcggtgttaatcccgagcaggctggccattttcagatcttccgcgcaggcgcggcaggcgcgccccatccgcgagtagcgaataaacagcgtcagggccagcatggcgataaaggtcaccacccagatcaccagttgcatggtggtgatcgtcgcggagaagctgtcgctgtggccgacgacccactggccgttaaacaagctcggcagcgccacgtcgcgggagccctgggtcaggctgacgtagttctgcaggaagatagacatcccgatggcggagatcagcgcaatcaggcgcttggagttacgcaccggccgataggccacgcgctcaatgctccagccgtaggtgctggcaatcacaatggcgcccacgaatccggcggcgaccagcagccagctagtgtcaatgcccatcatcatcagcgcggcgatgatcatgaaggagacatagctgccaatcatatagacctcgccgtgggcgaagttgatcatgccgataatgccgtacaccatcgtatagccgatggcgatcaacgcataggtactgcccagcgtgacgccgttaaacatctgctgcagaaaatagagaaactgctcggacataaggtaacctttttcaaaccgcccgcggttcgcaggcggagggataactcgtcttcagcgcttatttcgccgcgctcgaagagccgtcggcgtgccactggaagacaccaaactcaaatcccttcagatcgcctttttcatcccaggtcagcggcccaatcacggttttcgccccgtgcgctttcaaatctttgattaaatccagcggctgctggctgccggttctgtccatcgcctgcgccagcgactgaacggcggcataggtgatccagacgtacggtccgctcggatctttcttctccgctttcagcgcgttgacgatggcgctgttggcagggtcctgatcgtagcgttttggcattgtcaccagcatgccttccgccgcggcgcccgcgatattggacagcgaggcgttgccgaccccttccggccccataaacacggttttcaacccgacggagcgcgcctggcgcagcatctggcccatttccgggtagtagccgccgtagtagacgaagtcgatgttctctttcttcaggcgcgccagcagggcggagaaatctttttcccccgcggtgatgccatcgaagaagacgatgttggccccggctttcttcaggttgtcctgcaccgaacgcgccagcccttcgccgtactgctgcttgtcatgaatgatggcgatacgctgcggtttcactttctcgacgatatatttcgccgcggtcggcccctgcgaggagtcgaggccggcggtacgcatgatgtactggtatccgcgctgggtcagctccggattggtcgccccgggggagatcatcaggatgccttcatcctcatagatgtcggaagccggctgagtggaagaggagcacaggtggccgataacgtactgaataccgtcgttgacgattttgttggccaccgcgaccgcttgcttcggatcgcaggcgtcgtcatattcgacggccaccagcttgtcgcccttaatgccgccgctggcgttgatgtctttaatcgcctgacgcgcgccattgaactccatgtcgccccactgggccaccggacccgacatcgcgccgaccacggcgaccttaatatccttggccatcgccgcgtgcgacatcgctaatgcgacaatgcccgcgacgatggttttcgcgttccttttcatgctgcagaaccccgttcgtgatgtggtgtaaatgttttgtatttttatggttaaaaagcattctgtgcttttattaaacaacgccatttttaccattgagtttaatggtttagcgcagtttttcactaaaaaacagattaaaacctctatttttcagtcgattaagcaaagataatattctgtattttggtgaagataaacaaaaaaaagtccatcctgcagcataaaataacgatacataaggcggaataaaacgctgcacattaggttaaaattctgcttatttttcgatccatgacggattgcgctaccctgacaacgccaggaaaacgaatcccctgatgtacgcgcaaaaaacagcgctccgccagacagcaatattgggtacactggcgcctctgttttgcactggatttgccgcccatgaaactgaccattatccgtttacagcacttcagcgatcaggatcgcattgatttggggaaaatctggccgtcacaggatctgtcgacgctgacccttgatgaaaaccatcgtctctacgccgcccgctttaacgaacgcctgctgggcgccgtgcgcgttaccctgcgcggcgtcgaaggtgagctcagcgatctgtgcgtgcgtgaagtgacccgccgccgcggcgtcgggcaatacttagtggaagagacattgcgtgataacccggcgatcaatagctggcgcgtcgccgaccatggggtggaggaccgcggcgtgatggcggcctttatgcaggcgctcggctttagcgcccagcagaatggttgggaaaagcattaagccgtagccccaataagcggagcatgcccaaggaagaacccggcggcgcttcgcttagccgggctacctggcgactgtagccccggtaagcgcagcgcgaccggggtcagacaacgcatttgcagtgggaaaggcgccccccatttaatccagcatttcgcgttgtaaaaaggcgtcaagacccgaaatccccgggagcttacatcagtaagtgaccggggttgagggccgcagacaacgcatttgcagcgtgaaaggcgccccccatttaacccagcatttcgcgttgcaaaaaggcgtcaagacccgaaatccccgggagcttacatcagtgagtgaccgggattgagggccgcagacaacgcatcggcagcgtgaaaggcgccccccatttaacccagcatttcgcgttgcaaaaaggcgtcaagacccgacatccccgggagcttacatcagtaagtgaccggggttgagggccgcagacaacgcatttgcagcgtgaaaggcgccccccatttaacccagcatttcgcgttgcaaaaaggcgtcaagacccgaaatccccgggagcttacatcagtaagtgaccggggttgagggccgcagacaacgcatttgcagcgtgaaaggcgccggttaaattatttggcgtcggtcgccgtaccgttcgcatgccaggtaaagaccccgaactcgaagcctttcaggtcgcctttctgatcccacgacagcgggcccatcacggtgtctactgtcgcgcctttcaggtatttagcgatttccgccggatcgtcagactgattcaggcctgcctgcagcgactgcagcgccgcgtaggtggtccagacgaaggcgccgctcggatcctgtttcttcgccttgatcgcgtccacgatcggtttgttcgccggcacctggtcgtagttcttcggcttggttaccagcaggccttccgccgactcgccggcgatgttagacagggagacgttcgctacgccttccgggcccataaactgggttttcagaccggcggcgcgcgcctgacgcaggatctggcccatttccgggtgatagccgccgtagtagacgaaatcgatattctctttcttcaggcgcgccaccagggtggagaaatctttctcaccggcggtgatcccgtcgaagaagaccacgtttgccccaccttttttcaggccatcctgcaccgcacgggccaaaccttcgccgtactgctgtttgtcatgtaccactgcgatacgctgcggcttcactttgtcgagaatgtatttcgccgcggttggcccctgatcggagtccagaccggtggtgcgcaggatcagcttatagccgcgcgccgtcagttccggagcagtcgctgccggggtaatcatcagaatgccttcgtcttcatagatatcagacgccggctgagtggaagaggaacacaggtgaccaataacgtatttgatgccgtcgttgaccactttgttggctaccgctaccgcctgtttcgggtcgcaagcgtcatcatatttgacgatctgcagcttattgcccttgatgccgcccttagcgttgatatccgctaccgcctgctctgcgccggtaaactcctggtcgccgtactgggccaccgggccggacatcgccccgactaccgcgattttgatatcttccgccagcgccgcgctgctcataactaaggcaatacatcctgccagtaacgctttacccttcatattcatcctgaggctccccattattatggtttttgcatttgttgtgatgttgtttattagcgcattattttgtttataccgataggaaaagcatatgatagctaatcaaccgggggctgcccgcgcttttgcagcacactatgctaaacataccgtcattctgaggaatttgaaacgactaaattgcgggctatgtaacagataagtgacaaataaaaaaaccgcgccagcatgaaccggacgcggtgcaaaacagagcctgattaccagcctacgggtaggtagcccaccgcggatgctatcgcgtaggcggcgctgcaaagatacaacaacacaatgaagcattggataagcggatgggtcatccaggccggacaggtccagcccggggtcagatcgccacgctggcgggcgcccttgagcatcaggatcggcataatcgataaaatgacgccgctgaacaccccggcaaaatagagcgcgttgacgaaggagaccatgccgctataggccagcacgaacggcgggatcgccaccaccagcagcaccatcaggcgccgggcgggctgttcgtcattccccaggcggaactgatcgaagatattggtcaggaagctgccgcccagtccccagtaggaggtcaacatcgcgcacagcgcaaacagattggctgagaagaaggcccattcgccaagcgcccgaccccaggagatggtggccacatccgagatattgtccagaccgttaagcgagatcaccgacaacggcaccagcgccagcagggtaaaggtcagcgccatgccgaccatgatggctttaggcaatttttccggtttatcggcgaagccccgcgccatctccggcacgatatactgtgccgagaagcagaatgccacgacgttgaagaccggaaccatatacagccagttgccgtcgagcagatagccgacgcgggtggtctctttcaacagcgtggcaatcaccagcaccgagatcatcaccaccatgccgatgctgataaatttctcaccgcggccgatcgccttcagccccaggtagagtacccctgccgccggaacgaaaaacagcacgctgcccagcgccggcgagatgccaaacagggagtgcagcagcttaccgctgccggtcatatacgccgtcaatgccccgacgctattgacgcagacggagagaaacatcatcagcgcgccaaaaccgccgacatagcgcttcgataaaccgctgagctgcagatgtttacgggtgcgcagcgtggattccgcgacatagagcatagtcaccgtcgtcaggctgcccaccagcaccagccagaacagcagcggtaagaagcccgctttgctcgacgcataggcgatagagaggacgcccgcgccaatattggtaccgacaatcatcgataccccttcgacgaagctcagagattttgcagagacagccgtacgttcccggccggtgaggacgggagaaaaggtggagttttcagacataatactttccgttttactccggcggttttcaccgccggaaaaaaggtgatatcagggtgataaaccactcacgctgagcataaacagccggctgcggcgtcctgtttctgttcggcttccctgccgccgcagcccgccggggagacgttagctcttcagtacgcgcgccagaatatccagcgctttcgagaactgggcgtcggggatagtcaacggatacaggaagcggatcacgttgccgtagacgccacagctcagcagcagcaggccgttctcctgcgctttctgttgcacctggcgggtgaactccggcgacggctcgccagtttgcggatcgttaaactccactgccaccatcgacccccggccgcggacatcaacgatcgccgggcaggtagcgcgcgcctggttgagcacttcctgcagatggctacccagctgttcagcgcgctggcacagctgctcttcggcaatgacatccagcaccgcgtgcgccgcggccaccgccagcgggttaccggcataggttccgcccagcccgcctggggctggcgcatccatcacctcggcgcgaccgacaacgcccgacagcgggaaaccgccggcgaggcttttcgccatcgtcatcagatccggtttcacctcatagtgctgcatagcgaacagcttgccggtgcgggcgaaaccggtctgcacttcatcggcgatcagcagaatgccgtgggtatcgcacaggtcgcgcagcgcctgcataaaatcggccggcgcgacgttaaagccgccttccccctggatcggctcgagaatgatggccgctacctggtccggcgcaatatccgctttgaaaatgcgctccagacttttcagcgcatccgcggtggtcacgccatgcgccgcattggggtaaacgccgtgatacaccgagcccgggaatggcccgaagccgattttgtagggcgcgaccttaccggtgagggccatggtcataaaggtacggccgtggaaaccgccgccgaaggtaatcagccccggacgaccggtgtaagcgcgggcgattttcaccgcgttctcgaccgcttccgcgccggtggtgaagaaagccgtttttgccggcccgtcaattggcgccagatcgttgatacgctccgccagcgaaacatagctttcgtacggcacaatctgataggcggtgtgggtgaacgcctgcagctggtcggcaaccgcggcgaccactttcggatggcggtgaccggtatttaacacggcgatcccggcggcgaaatcgatcacctcattgccttcgatatcccacagcgtggcgttttccgccttctcgacaaagtagttacacattacgcctacgccgcgcggcgtcgcctgctggcgacgttgattcagttctgagcttttcacctgcgaatctcctgtcgtgtatgtcacgttatcgcaacaaattagaaacgatgtcgtttatttacacaggagttggccctataatcgagtaccaattttgaatatctgagggatccaattgcgttcgctggtgggtgacctggtgctggtccgtctgcaggaagagcgggatcctcttctgcacaaacgcttatataacgcgctgcgccgcgcgatcctcgacggttcgctggcgcctcaaagccgtctgccgccgtcgcgggacctggcgggcgaacttggcgtatcaagaaacaccatattaacaacttatgaacaattgctggcggaaggatatgtggtttcccgtcggggaagcggaacattcgttgcccaaaccgcccctgagagctcattgacggctaaaggtcagcaagaaaacagcagtatcgcagcaccgacggcgcatatttcacgccgaggccagcatctgctcggccaggtcagcgccagcccgcgccagtggggagcgtttatacccggcgtgccggacgttaacgcctttccccacccgctgttcagtaagatccaggcccgcatcagccgtcggcccaaaccggagcggctcagctatagctgcaacggcggcactccggaactgcagcaggcgctggtggattatctgcgcgtgtcgcgcggcgtccactgtcagtcagatcaaattcttatcaccgaggggatccaccaggcgatcgatctggtcacccgcatgctgtgtgataacggcgatctggcgtgggtggaggagccttcctactgggggatccgccacgtgctggcgatgaacgacgttcgggcagagcccctgaccgtcgatgccaacggcctgtgcccgccggagacggttgacgatgcgccgaggctgatcttcgttacgccttcccaccagtatcctctgggcgcggtgatgagccttgagcgccgccagcgcctgctggcactcgcccgtcagcaggggagctggatcgtcgaagatgattatgacagcgagtttcgcttttccggtcagccgatccccgccctgcagggtctggtcgccgacgccccggtggtctatatcggcaccttcagcaagacactctatcccggcctgcgcctgggctacgtggtgatcccgcggccgctggtcagcgacctgaagcacgcccatgccgagctttaccgcggcggccattcgctgatccagatggcgctggcggagtttattaccgccggccactattcggcccatatccgccgtatgcggctgctctacagccgtcgccgcgcctttttaactgagcttatccagcggcactgtatgccgtacgccctgtctgacttcagcgataaggccgggctgcatttgatcctcaatttgcccgcagaggctgacgatgtggcgatcgccagagaggccaatgcgcggcacattctggtgcggccgctgtcgcgctactacctgacggcggcgcgcaagaaaggattactgatgggattcgccagccagcccgaagagcagatggcgtcggcgttcagcgtcttactcggctgcctgcagacgcactgcccgcagatgctcctgcccccgggggacgcagaaaaacaaaacgccccaacctgaggcggggcgttatcgtggagcctgatatcaggtatcaggcaggcgtggcgtatcaggcttcgatagcggcgcgcagttttttcatggcgttcttttccagctgacgcacgcgctctgcggagacgccgtagcggtcggccagttcctgcagcgtggacttgttatcttcgtccagccagcgggcgcggatgatgtcctggctacgctcgtccaggccctgcatcgcgtcagtcagcttattcgccgcctgctcttcccagttatcgtcttcgatgccgtcggcaaagttagacgttttgtcctgcagatacaggaccggcgccatcggctggctgtcggactcatcgtcggacgacatgtcgaaggtcatgtcctgggccgccatacgggattccatctcgcggacgtctttgctcgacacgcccagctcacgggccaccatttccacttcatcctgattgaaccaacccaaacgctgtttggttttacgcaggttaaagaacagcttacgctgtgctttggtggtagcgaccttcacaatacgccagttgcgcagcacgtattcgtgaatttcggctttaatccagtgcacggcgaaggagaccaggcgcacacccacttccgggttgaagcgacgcacggctttcatcaggccgatattgccttcctggatcagatccgcctgcggcaggccatagcccgagtagttacgagcaatgtgaacaacaaagcgcaggtgagacagaatcagctttttcgctgcttccagatcgccctggtaatgcagcttttcagcaagctcccgctcttcatcagccgacagcatcggccaagtgttagcggcccggatgtacgattccaggttaccaacgggggctaaagctaaagtttgcatttctttggtcattcaaatcctctcaattgatatcttctgacgcgttcttgtccccatcaggcaacaagcatgccagcattcatgagcaacgagaatatcactcacattagtatcagacagtgattttatccacaagttccatgcaacggtgtgaataaattacgcacaaaatgtgacaccacgatgaaaaagtgagggcaggaaaaggggaacaagcttgcggtatctttccctgcgaacaggaactcattgcagcagggaaagattatatcacgcttttattaatcgggagtaaagtgacgtaaatgttgcactgtcgccagccaggcggctacccacccgatcatcgagcagacgatcaacatcaacagacactcgtcgaagcctaagccgctcagctcaaactgggtgccgaagactttcgccacttcggtcaccgccgacgagaggcgcattaccagaatctccgacaggatcagcgataaaaacgcgccggaaaagcccagcatcgctccgccgtagaggaacggacgcaggataaagccgtcggtggcgccgataagcttctgaacgttaatggtatcgcggcgggcgaagatgctcaggcgcacgctgttgccgatcaccaggaacaccgccgccaccatcagcacgccgatcatcgccgacacgcgtcctaccagcccggtgagcgaggagagacgggcaaaccaactgtcgtccatccgcacttcatcgacgccctggatccgcgttacccgatcgcgcagggtattcagcgcctcggtgctctggaaatccagcttcggcaccacgatggcgaccgccggcagcgggttctcctccagcatatccagggcgccgccaaagccagaccagttacggaattcccccagcgcctcgtcacgggacaaatagtttaccttgtcgacgccctgctccgcctgcagctggcccaccacccgcgccgcggcatcgtcatccagcgttttttccagataaacggtgatctgcggcgagggataatactgggacgccgcgctgctgacgtttttgtagaccatgtagcagacgcttggcagggtcaacgaaatggcgatgaccattaccgtcaggaaggtcgccagcggcgtgctttttagatcctgcagcgcgccgtgccaggcatagcgcacctgctcgttgaatacgttgctcttacgcgaggccgggttaggcgccgctttcggccgttttggcgcattgcgcccgccgccgccgccgcccgcggcgttgcgcaggcgatcgaacttgctgccgaactggcgaatctggttcattgcgtcgcgcttattcaccccgaatgcctccatgcagatggccgtcgctaagcgtcagcacgcggtacggacgactggagataagccccagatcgtgcgtggccatcagtaccgtcaccccgacgcggttaaactcttcaaacagacgtaaaatcccctccgagagcgcctcgtcgaggttgccggtcggttcatccgccagcagcaccgccggcttgttgaccaccgcgcgagcgattcccacgcgctgctgttcaccgccggagagctgaatgggaaaattcttcgctttgtccagcaggccaaccttgtccagcgccgccgagacgcgacgacgaatatcatcgccgctggcgccggcgataatcagcgggatcgccacgttgtcatacacggtacgatccatcagcaaatggtggtcctggaaaatcataccgatctggcggcgcaggaacggcacctcacggctcttcagacggctgatttcatgaccgctgaagaagattttcccggcgctgggccgttcgataccacagataagcttcagcagggtactcttccctgcgccggaatggccggtcagaaacgccatctcgcccggctgcaggtggaaggtcaccccctgcagcgcttgtctcccaccgagataggctttgctgacttgttcaaagcgaatcattcttaatcctctcgggcaaaaagtgcctcaataaagtcgcccgcattaaacggacgcagatcctcaatacgctcgccgacgccaatatagcgaatcggaatgccgaactgatcggccaccgagaagatcacgccgcctttggcggtgccgtccagcttggtcagagtgatcccggtcaatcctaccgcctcatgaaacagtttggcctggctaatagcattctgcccggtgctggcgtcaatggttaacatcacctcgtgcggcgcgtcgacgtccagctttttcattacccggacaatcttcttcagctcttccatcaggtgcgatttattttgcaaacgcccggcggtatcggcaatcagtacgtcaacatggcgcgccttcgccgcctgaatggcgtcgaaaatcaccgaggcggagtcggcgccggtgtgctgggctatcaccgggatattattacgctggccccagacctgcagctgttccaccgccgccgcacggaaggtatcccccgccgccagcatcaccgacttaccctgctgttcaaactgacgcgccagcttgccgatggtagtggttttccccaccccgttcacgccgaccatcagaataacaaatggcgttttgccttcaacgttcagcggctcgtctactttggcgagaatctcgcccatctcttctttcagcaggccgtacagcgcttccgcatcgcgcagctgcttacggctggcgccttccgtcaggttggtaatgatcttgcgggtggtttccaccccgacgtcggcgatcagcagctgttcttccagctcttcaaacagatcatcgtcgatcttcttaccgcggaacaggctgataaatccggaaccgagattttgcttcgttttcagcaggctacgtttgaggcgggcgaagaaaccttcttttgtcggtttttcctgctcctgagccagcgcttcaagcggcgcctcgtcctcgggcgccggcaccactaccgccgcctcttctgccgcttcggccgccagcgcctgcgcttccagctcttcatcgcttaacggcgcgtcctcttcgggcgcttctgtctcctgcggctggacaacgatgccttccacaggctgctctgctacggcttccgccaccaccggttcggcgataacctcttccgccagcggctcaaccaccgcaggctgttcaggcggttcgctgaccgcgggctccggttcaacaacaggcgtttcttcggtcagagcaggcgtttccacccactcttcttcctgcgcgctggcaggctccgcgaggtgcgctttttcgctttcgaccaccgtctcggtcacttcgacgacgtcttcggcaaacgcctccgggtctgctttcggcgcgctcggctcagcaggggtttcaaccgccggtatctcttcggcaaccgcttgctgttcttctactttttgctctgtctcggtttcctgtgcctgttctttctgtccaaagcccagccaggaaaagaagccacgttttttctcttttgccatttgcgaccacactcctcgctgtttattcatggcgcagcttcatcagaagctgaaaaaatgatgaaattagttggatagtctatcacttaacttaactcgcagcaccgcccccggattaaggtttcgtcaaccgccgtcgatcgctagaatagcaggctggaagttgagacttgagcagagagatgaaaaaaccaaaccacgcgggcagcggtcagatccgcatcatcggcgggcaatggcgcggccgtaaattaccggtgccggagagcccgggcctgcggccgaccaccgaccgggttcgcgaaaccctttttaactggctggcgccgtccattgttgacgcgcactgcctcgattgctttgccggcagcggcgcgctggggctggaagcgctgtcccgctatgcggccagcaccacgctgctggagatggagcgcggcgtagcccagcagctgcaaaaaaatctcgccaccctgaaagcggatcgcggcaaggtgatcaccaccaacaccctcagcttcctgagccagccggggaccccgcaccagatcgtgttcgtcgacccgccgttccgtcaggggctgctggaggagacgctacgtctgctggagacacaaggctggctggccgatgaggccctggtgtacgtcgaaagcgaagtcgaaaacggcttaccgccggtgccggctaactggcaattgtatcgtgaaaaagtggccggacaggtcgcctaccgtctttaccaacgtgaggcccaaggagagcaccatgctgattaatttaggccgcctgctgatgctgtgcgtctgggcctttctgttattgaatctgtttcagcccttcccgaagccgctgaatatctttgtcaacgtcgcgctgattttcatgatcctgatgcacggtctgcagctgacgctgctcaaggcgacgcagccgaaagaggcgccgccgctgagccgctttgagcaaatccgcatttttattttcggcgtgtttgagctcgtcgcctggcagaaaaaactgaaggcgacgctgaaaaaatagtcctgaaaagggctcagggatcgggcgtaaacgccacgaacgctgtgcccttataactcaacattccacgatcgccgacgctcagcgcgtgatattgcggcgcgtcaaggcgaaacaccacctccagaccaccgttttcggggcgaaagctcgcttcatagcgcatctcactgcctgcaggcgtcaccgtctgctgccgcgatcgccgatcgttaatcactttttcccgtttattgctgacgataacccgcttttgtagcaacggcgcggcgtcattcgcctgtttctcacggcgctgctggacatagcgaaacgaagccgccaccacaatcaccgcgacgaccagaacaaaaaagaggggcattttactcatcaaggttacccataaaaaatatcaggaatcagcatactgcgtcgggaataacattgtcatctgctacaccaaaccactacactgagtagtagcatcacgcatccgtaactttctttatgataacagatacagggacttactatgctttggtcatttattgctgtctgtttctccgcatggctttatgtcgatgcatcctatcgtgggccggcatggcgacgctgggtttttaaacctgtcaccctgattctgttgctgttactggcctggcaggcgccgatgttcaatgccatcagctatctggtgctggccggcctgtgcgcctcgctgctcggcgacgccctgaccctgctgccgcgccagcgggtgatgtacgcggtgggcgctttcttcctgtcacatctgctgtataccatctggttcgccagccagctgacgctgtcgttcttctggccgctgccgctggtgctgctggtattcggcgccctgctaatggcggtgatctggagtcggctggaagagatgaaaatgccggtgctgacctttatcggaatgacgctggtaatggtctggctggccggcgagctgtggtttgcccgccccaccaacaccgcgctgtccggtttcgccggcgcagccctgctgctgctgagcaatgccgtgtggctggtgagccactatcgtcgccgcttccgcgccgataacgccatcgccgccgcgttctactttgccggccacttcctgatcgtgcgcgcgctgtacctgtaatttagtccttgactctggagtcgactccagagtgtatcctacggctaatgagaaaattatcatttcccggagggtgccatgtcgactccagacacgcaggataaaaaagtcccacaattctcgtctttcaccatgcggccagcgaccgccccggcggagagctgctgtacagatcacgcctgcgccacagagtccgcccctgccgccgaagcgcttagcgacgcccgctatagctggcaagttgatggcatggactgcgccgcctgcgcccgcaaggtggaaaccgcggtccgtcaggtgcccggggtcagtcaggtccaggtgctgttcgccacagaaaagctgctggttaacgccgagggcgatgtccgcgctcaggttgagaacgcggtccgccaggcggggtatacgctgcgcgatgccgatgctcccgcagctaagcaaacccgagggtcgctgctgcgcgacaatctgccgttactgacgctggttatcatgatggccttgagctgggggctggagcaggccaaccaccctgccggtcagttggcctttattgccaccaccctggttggcctgtggccggttgctcgccaggcgctgcgcctgatcaagagcgggagctggttcgccattgaaacgctgatgagcgtcgccgccatcggggcgctgtttatcggcgccactgcggaagcggcgatggtcctgctgctgttcctgatcggcgagcgtctcgaaggctgggccgccagccgcgcacggcagggggtgagcgcgctgatggcgctgaagcccgacaccgccatccgtctgcgcaacggcgtgcgggaaaccgtcgcccagcgcgacctgcgtcccggagatgtgattgaagtggctgccggcgggcgtctgccggcggatggccagctgctgtcgccgtttgccagctttgatgaaagcgctctgaccggcgagtcggtgccggtggagcgtcaggccggggaacgggtagcggcgggcgccaccagcgtcgaccgcctggtgcagcttaccgtgatatccgaaccgggcgacagcgccatcgaccgcatcctgaagctgattgaagaggctgaggagcgtcgggcgccgatcgagcgcttcatcgaccgcttcagccggatctacaccccggccattatggtggtggccttgttggtcgccattgtcccgccgctgttcttcgccagcgcctggctgccgtggatttataaaggactgacgctgctgctgatcggctgtccatgcgcgctggtcatctccacgccggcggccatcacctccggcctggcggtcgccgcccgccgcggggcgctaatcaaaggcggcgcggcgctggaacagctgggccaggtgcgccaggtggcgttcgataaaaccggcaccctgaccgtcggccagccgcaggtgacttcggttattgccacggccgaagttgacgacaacgcgctgctggcgctggcggcggcggtggagcaaggctccagccacccgctggcgcaggctatcgtccgtgaagcgcagcggcgtcagctgagcattccgcttgccagcggccagcgggcgctggcgggctctggtatcgaagccgaagtcaacggcagccgcatcctgatctgcgcagccagcaaagccgccccggcagagcatgaggcgcagatccagcagctggaaagcgccgggcaaacggtagtgctggtgatgcgcggcgagacgctgctcggcattctggcgctgcgcgataccctgcgcgacgacgcgcgtcaggcggtggatgctttgcatcagttgggcgttcagggggtgatccttaccggggataacccgcgcgccgcggcggccatcgccagcgaactggggctggaattccgcgccggtctgctaccggcagacaaggtcaacgcggtgatagcgctgaatgccgacgcgccgctggcgatggtcggggacggtatcaacgacgcgccggcgatgaaagcggccaccatcggcatcgccatgggcagcggaaccgacgtggcgctggagacggccgacgccgcgctgacccataaccgtctgaccggcctggcgcagatgatttccctggcgcgcgccacccacgccaatatccgccagaacatcgcgattgccttagggctgaaggggattttcctcgtcaccaccctgctcggcctgaccggtctgtggctggcggtgctggcggataccggcgccaccgtgctggtaacggctaacgcgctgcggttattgcgtaagaagttgtagcatcgataccggcttccctgctcgcgctacgcttagcagggctacggttccagaccgtcgggtagcccggataaggcgctacgcgccgccatccgggagaggctcagggacgtaggccaggtcaggcgcagccgccaccggggaaaatatcggacactgtgcctgaaatagcgcccggcggcgctgcgcttgcgcgggcctacgggtggagcggtttgttgctgctgtaagccgggtcaggcgtagccgccacccggcaaaagacaacataacggcataaaggggtagcccggataaggcgctacgcgccgccatccgggagaggctcagtggcttttgcggatcaggtagcggtacggcagggcttcggtttcctgggccaccagctcatgctccataaagcggcagaatcccgggatatcgcgggtggtggccggatcgtcagcaataatcagcagcgtctcgcccaccggcatcgtccgcacggttttacgcaccatcatgaccggctccgggcagcggagtcccagggcatccagggtgtggtcaggagtggagaaaagttcgctcattttagtctcacgtcaacaaaacggccctagtttaccccctgctcgccagtacgcaagacaggttaacgtttgcgcgaaaaacaaccattgcattacgccggcaacgcagtatcatgcagccgtttttaattgggttccctcaccccaacgttccgctgccgattgctcattcacctgaagcatgacgggcataaaaaggtcacaatatgaatccgtttactaccgtacagcgcaaaaaagcgctcgtctggctttcgctatttcatttgctggtcatcacctccagcaactatctggttcagctgccgatctccatctttggtttccataccacctggggcgcgtttagttttccgtttattttcctcgccaccgacctgacggtgcgaatttttggcgccccgctggcgcgacgcatcattttcgcggtgatggtcccggcgctggccatctcttacggcatctccgcgctgttctacatgggcgaatggcagggctttgccgcgctgggcacctttaatctcttcgtcgcgcgcatcgccgtcgccagctttatggcctatgcgctggggcagatcctcgacgttcacgtctttaaccgcctgcggcagagccgccgctggtggttggcccctaccgcctcgacgctgttcggcaacatcagcgataccgtggcgtttttctttatcgctttctggcgcagcccggacccgtttatggccgcccactggggggaaatcgccctcgtcgactacagctttaaagtgcttatcagcatcattttcttcctgccgatgtacggcgtgctgttaaatatgctgttgaaaagactggcggataaatctgatttgtcggcattacagccgagttaaaggtactcgcgggctgatgtgttaagatagccggatgagccattagtggccgtttatcgaaaggaagatgtcaatgcgcaatttggttaaatatgtcggtattggcctgctggtgatggggcttgccgcctgcgataacagcgattcaaaagcgccaaccgttggcgcagcagcggagagcaatgccagcggccaggcaatcagcctgctggatggcaagctgagcttcaccctgcctgcgggcatggccgaccagagcggcaaactgggtacccaggcgaacaatatgcacgtctactctgacgctaccggccagaaagcggtcatcgtcatcgtcggcgacagcaccaatgaagatctggcggtgctggcgaaacgcctggaagatcagcagcgcagccgcgacccgcagctgcaggtggtgagcaataaaccgctggagattaaaggccataccctgcagcagctggacagcatcatctccgccaaggggcagaccgcctggtcttccgtgatcctcggcaaagtggatgacaagctgctgaccctgcaggtcaccctgccggcggataaccagcagcaggcgcagaccgaagcggaaagcatcatcaacaccctcaccatccagtaattactggcctggtgcgctggcctccggttcgctaaccgggggccgtttttttagccgccagcccaacagcagcgccgccatcaccagccccgccgcggcgagataaatcatcgagatcccggtccacgccatcagcaatccggccagcggcccgctgacgcccaacgacaaatccataaacacggtataggtcgccagcgccgacccctgattgtgctgcggcaccgctttcaccgccaccacgcccagcgccggaaagaccagcgaaaagccagccccggtaaggaaagtaccgattttcgccatcatcggcgtatcggcaaagccgaccagcagcaggccgatcgcctccacgctaaagcagagcatcgccacgttcagcccgccgagtcggttaatggcgttgggaaacagcagccgcgcgccaacgaatgcgcagctgaataatgtcagcgcgaaagccgcgccgtcccaacctttggcgtcataaaatagcgtgataaaggtggcgatcaccccaaagccggcggaggccaacgccagcgccatgccgtagggccagacccggccgagcaccgcgcgaaacgacatcgctttgcctttggcagccttcaccgccgcgcggggcagcgcgcagaggatagccaccagcgctaccgccataatgaccccggccagaccgctgagtccaatgtgcgaatagcacagcacgccgagcggcgcgcccatcgccatcgccccataggtcacaatcccgttccacgagatcacccgcccgatatgcagcgaaccgaccacgccgacgccccacagcgtcgagcctgtgccggcgaagctctggccgataccaaggatcacccgtccgaggcatagcagcagcaggctaatcagtggccagccgctgccccaggcggccagcagatagctcaaaccgctcaaaaagcagccgccgaggccgaagacgacaatctttttgggccccagcaggtcggcatagcgcccggcatgcgggcggctgagcagcgtggcgaaatattgcaggctaatcaccagcccggcccagaaagcgctaaagcccatgacatcatgaacatagccgggcagcaccgccagcggcaggccgatggtgaggtagctggcaaagttaaagataacgacagagacaatccgcagattgaggcgcagtccattaagcgccggttcggcgacgggttcgggcatcaggttccaccagatttcgacaaccagctttcactattaccacgctgtcggcggaaaagcagccctcctttcggaatattggcagtcggcgaaccgctacacttatctggcgcgactcataaaaggaatacctatgtcccctccgcaggctgataaagccgggcttcatattttacttaagctggcggcgctggtgattatcctcgccgggatccacgccgccgccgatatcctggtgcagctgctgctggcgctgtttttcgctattgttctcaacccgctggtcacctggttcattcgccgcggggtgcggcgtccgttcgccattaccctggtggtgacggcgatgctggtgatgctcaccgcgctgctcggcgtgctggcggcgtcgctcaatgactttgtcgccatgctgcccgatttcaaccgcgccctgacgcgcaagatcctccagctccaggagtatctccccttccttaatctgcatatcaatccggagcggatgctgcggcgcatggattcagaacggctgatgacctgggccacgacgctgatgacccagctttccggggcgatggccagcatcgtgctgctggtgatgacggtgatctttatgctgtttgaggttcgccacctgccctacaaactgcgttttgccctcaataacccgcgcctgcatatcgccggattgcaccgggcgctgaaaggcgtcacccattatctggcgctgaagacgctgattagcctgtggaccgggctgattgtctggctggggctgctggcgatgggggtacagttcgccctgatgtggggggtgctggcgtttttgctgaactatgtgccgaacattggctccgccatctccgctatcccccccatgctgcaggcgctgctgttcagcggcatctatgagtgcctgttggtaggggcgctgtttctggtggtgcatatggtgctgggcaacatggtggagccgcgcatgatgggccaccggctggggatgtcgaccctggtggtgttcctgtcgttgttggtctggggctggctgctggggccggtgggaatgctgctctcggtgccgttaaccagcgtctgtaaaatctggatggaaaccaccgtcgggggcagcaagctggcgatcctgctcggcccgggccgtcccaaaagccggctccccggctagcggcgtttcaccggccagaagatggtcaatacgccggcgacgatgatcgccacgcccagcagcgattgccagtagaacggctcatgccagccgggcagccagatggcggcggcccacacgaggatatagctcaggctcagtagcgcatacgctttcgacagcggcaggcgatggagggcaaagtaccagcagaccatcgacagcaggtagcccagcaggccgaaaaacaggccgaaagtcccgggctggaaatgcagcagatgctggagaaatgccacaatatcggtcagcggcggcaaggccaccatggcgctgcgcagcagcaactgcgcggcgctgacgaggccgacgctgagtaatgcccagaaaaagcccatcagacgctggtccccagaatgacaatgcccacgacgatcaacccgacgccaagccagtggcgacgggcgaccggctcatgccagatgccccagcccgcgagggtaacccagacgaaattcagactcagcatcggataggcgatgctgaccggaatagactgcaggacgctcagccacagcagcatgccgcagcccagacataacagcgccatccccaaccagaagagtatatggcgactccgccgtccgcgacgggacgggcgggtcgcctgtttctggcagagctgtccggcgcagctcagcaggctggcgcacaccagacagatccagacgctcattgcggcaggtactgaaggaaaacgacccggcccagctcgtaggcgttatccggtttcggtaacggtaagtcgagcatactctctcctttatccatcaacagcaccagcgagaccggcccctgctgacgatgcgcggccagccagtcggcaaaaccggcctggctgacaaagcttccctgagcatccggccagtcgagaccgtacttcagctcaccctgtttgtcgaacataataatatcgcttcgcttcagctcccaggccaggccgccggcgatcccaacgttgttggtcaggacgtaacggctgggctgcagggattcgctgacgatctccacaaggaactgcggctgtttgctgtcgataacccggtccgggatggcgaagcccaccagcagcgccaggccgagcggacagagcgcggcgaggctccagcggcggccagagtctttcatcgccagccagcccatcagcgcccagacggcaaaagcgatcgccgccagcagacatttatacagctcaatcttggtccacaccggcttatgcatgaagccccacggcgagaccaccagcacggcgataagccccagcaaaccaacgcccaggttgatcatcccgttgatgcgcaacgctttcgcgccggtctttgcggcctccagcgcgtagcgggccatcaggatcgacagcggcgcaaagcacggcagaatataggtcggcagtttgcctttggcgatactgaagaacaggaacggcatcgccacccaacctaacagatacagcgcgccgcgggcctcatcgcgctcaagccagccgcgctttagcgcccccggcagcagggccagccacggcagactgccgacgatcaggaacgggatgtagtaccagaacggcgctttgtgctgggcgtctttttcagcaaaacgctgaatatgctcgacccagaagaagtagcgccagaagtccggctcgcgctgggcgatagccagcccccagggcagcaccaccagcgtacagacaatcaccgccagccagccgtaggtcagcacttcacgccagcgtttacgggcgatcacccacggcagaacgcccaccaccggcaccgccagcgccaggaagcctttggtcatcacccccatcccgcaggcgacgcccagcagcacgtagcccagtattttgccgctgcggctctgcgcctgcgccgcgtcccagaagctgcacatcgccagcgccagccacagggtgatcatcgggtccagcaccgcataggtgccaatcgcatacaccagcatcgcggtgaggaagataaccggcgacaggatagctacccgcttatcacgaaagatccgccacgccagccaggccaccagcagggcggtcatggtgatggcgaagaccgacccgaagcgtacgccgaagttattatggccaaacagccactgaccgatactgttgatccagtaaccggcaatcggtttttcgaagtagcgcaggccgagaaaatgcggtaccacccagtcgccggtggccagcatttcacggctgatctccgcgtagcgggtttcgtcgggttgccagagcaaacggaaattgagcggcagcagataatacagcgcaaacagcgcaatcagagagacgccatagcgaatgcttttcatcaaatacccgaagtcagtaattgttcacgtccgagccagccttcccggccagccagttcaccacgaaccactttgcctgagggcagctcgctaaagtcagcgggcagcagctggctcagtgggcaaaactgaatttcttcttccgccgccatggtcagtagttcattgaactgatcggcgtaggcaatgccttccacttcagcgtgaatggtatagaccggaacgcccgcatcgcgatggatgcaatccagcaggtagcggttaaagccggcgatatccaccgccgtgcccaccgcctcgtcccaggtcggcaacgtgaccgggatctgcacggtaccagagacgccgctgccgagctggggcagaaacggccgcgtgccgcgacagtcgctgttgtagagaaaatcgaaggattctttggctttaaccacccgctgatcggcgcgccagccggcgacggccgagcaggtcaccggccggccgatgatgcgctcgagctccagcaggccgcgctcaacctccagcgccagcctttcctgcggccagacgccgctccacgcctgccagctgtagtggtcccaggcgtgcaggccgacttcatgagattcggcggcggcgcggatcaccgcttcgttccctgcgccgatgcggcgccccggccaggcggtgccggccagcagaatatcccagccgtacagcgaggcggctctggaacgcagcatcttccacagaaacttcggttttaccaggcgccacaggtggcgccccatattgtccggcccgacgctgaagaagaagcttgcctggatcccatgccggcccagcagctccagcagccgcggaacgccgtcccgcgtgccgcgaaaggtatcgacatctatgcgtaagccgacctgtttcatggatttttatcgtccaccagttcaaccgtgcgcagaaagaagtccagcgtgtgttcgaccgtttcttccatctccaccttcggctcccagttcaggcagcgtttggcgttgcggatgctcggcttacgatgctcaacgtcctggtagccctttccgtagtaatcgctgctttccacttcacggaagccggcgaacggcgggaagcgatcgcgcagcggatgacgttcgaagcaggcgagcagcatttcggccagctctttgatactcgcttcgttatccgggttaccgatgttaatgatctgcccgtcgcagcggccgtctttgttctcgatgatgcggaacagcgcttcgataccgtcgctgatgtcggtgaagcagcgcttctgcttgccgccttcgataagcttgatcggcgacccttccaccaggttgaggatcagctgagtgatggcgcgggagctgccgatacgcgcggcgttgaggttatccagccgcggccccatccagttgaacggacggaacagggtgaacttcaggccattcttatcgccataggcccagatcacacgatccagcagctgcttggagaccgagtagatccagcgctgtttgttgatcggccccaccaccaggttggagctatcttcgtcgaaatttttgtcggtgcacatgccgtacacttccgaggtcgacgggaagataatgcgcttattgtatttcacgcagtcgcggatgattttcaggttctcttcgaaatccagctcgaacacgcgcagcgggttgcgggtgtattcgataggcgtggcgatggccaccagcggcagcaccacgtcgcatttcttaatgtgatactcgatccactcagagtgaatgctgatatcgccttccacaaagtggaaacgcggacagtcgagaaaacggctgatggcgtcggagccgatatccagaccgtaaatctcatagttgtcgtcctgcagcaggcgctcggtcaggtggttaccgataaagccgttgacgccgaggatcagcacccgggtgcgacgcttaatcgccaccaccggtttgctgctgatcaccgccccggacaccaggcccagcgcctgcgccagctgagcgccctgcatgtacacgccgcgttcggtctggccggtgacaatctccagcgccccgtcctggcacgcgaggatcagcggcgcaatggagagcacggtgcccggtttagctgctggcaaatcgtggcgaacgcgggatttccagacgataaacttgttcgctccggcgtagccgaaggcgcccggccacggatccgagaccgcacgcaccagattgtgcagggtctgcgccggcagctcccagtccagccggccatcttccggggtacgacgccccacataggttgcctggctgtgatcctgcggacgctcatcggtggtgccggcgaggatcgccggcagcgcccggctcagcagctcagtggcggcggcgcacagcttacgatgcagcgtcagggcggcgtcatccgcgccaatcgccacggcctgctgggcgacgatatcgccagcgtctgcgcggttcaccatccggtgcagggtgacgccggtttcgctttcgccattgaccaacacccagttcagcggcgcgcggccgcgatattttggcagcagcgaaccgtgcaggttgaacgcccctttcggcgccagattgaggatctcatcgcccagcaggttgcgatagtagaaggagaacagcacgtccggcttcatctcgcggatacgctcaatccacagcggatggttcacgtcttccggcgcccacaccggaatgccctgctcggcggcaaggcgcgccacggagccaaagaaatggttttcgccagggttatccgggtgggtgaaaatagcagcgatatcatacccggcgtccagcagagcctggataccggtgcagcccatatcgtgataagcgaagactacggctttcatgaacgatcttcctctttagatgccgtttccggctggcgaacaacacgttgaataaagtagcgggggcgggcgcgcacgtcgttatagatgcggccgatatactccccgagcaggcccataccgacaaactgggcgccgatgaacatgaacagcacggcgaagagcataaacaccccttccgccgcccactgcgggccaaaggccagacgcagcaccaccagcagcaggccgaaggcgaagcccagcagggcaatcacgctgccgaaaatgctgagcagacgcagcggcgtggtggtcagacaggtcaccaggtcgtacatcaggttgatcaggcgcatgaagctgtatttggagtcgccgaattcgcgctcggcgtgcatcaccgggatctccaccgcgcgccgggcgaaggtattcgccaggatcgggataaaggtgctgcgctcatggcagttgagcatggcgtcgatgatatggcggcggtaagcgcgcagcatgcagccgtagtcgcccatcgctttgccggtggtgcgctggatcaggcggttgatcatcttcgacgcggttttacggaagatgctgtcctgacggttctggcggacggtgcccaccacgtcgtaaccttcatcagccttcgccaccagccgcgggatctcctccggcgggttttgcaggtcggcgtcgagggtaataatcagatcgccggttacatggctgaagccggccatgatcgccgagtgctggccgtagttacggtttaacagcacggcgacgacgtggctgccttccgcctcggcggcttcggtgagcatgcgcgcggaatcgtcgctgctgccatcgtcgatcaacagaatttcatattgccgccccagggtggcgcaggcggcatccgtacgacgaagcagttccggcaggctatcctgttcgttataaaccgggataaccaccgagaccttcttcacgggagggtaagtaagcatatcaacgtcctgacaactggcgcagtgcggagataacgcgagtgacatcgtcatcggtcatatccgggaacaacgggagagagcagatgcgggcgctgttccattcggtattcgacagggaaacctcagggaagcgctcgcggtaatatttttgcgtatgggccgcacggaagtgcaggccggtgccgatgcccatcgccttcagcttttccatcagcgcgtcgcggctaatgccgcacgcggcctcatcgacgcggatgataaacagatgccaggcgtgctggtgatcccaggtcgggacgctcagcggtttaaacggcgtgtccgccagctcgcgcaggtagcgctgggcaatctcggtccggcgctgattggcgtggctcagtttttccagctggaccagcgccagagcggcgttgatatcggcaaggttgtacttgaagcccggggtgatcacctccgcctgcggcgcgcggccgtgggtctggcgatcataagcgtccacgcccagaccatggaatttcaggctacggatgcgggaggccagctcgtcgtcatcggtgacaatcagcccgccttcggcacaggtcatgtttttgatcgcgtggaacgagaaaatggcggtcccctgccagcccacgtgacggcctttataatgggtaccggccgcatgggcggcgtcttcgatcaccgaaatgccatggcgctcgcccaccgcgcgaatggcgtcgatgtcggctggcgccccggcgtagtgcacgggaattatcgctttggtacgcgaggtgatcgccgcttccaccgctgcaggggtaatcatcagattgtcgttatcgacatcgatcatcaccggcgtggcgcccagcaggcagatcatattgagagtggagacccaggtctgggacggcgtaatgacttcatcgccggggccaatacccagcgccatcagggtcacatgcatcccgccggtcgctgaactgacggcaatcgcgtggcggttgccggtcagctggcagaatgccgcttcaagtgcctgattcttcggtccggtggtgatccagcccgacgctaaaacttcacgcagggctgccagctctgcgtcgcccatcgacgggcgcgaaaaaggcaaaaaatcgctcatcatcatcctgttctgtagatgacccacgcacgaatctgggtcgttagaataaaatatcctgcgcctgcggacttaaacgaaattaaaatgaagtgagttcagcacggcattccatttcagggtatctcgaccactattaatgtagtcgaccttgcttaggataatattaagaaattaatatttcttcggaataagaaataaattcttaataaacagtatgataggatttttttatggcagaaatttgacggagatgcgttcctgtcacgaaaaagagaacaggaacgcaatagttgaaattaaacgagaactaaaccagttcacaatttattattctgtcattgtcacgcttaatgacaaaaagttagcgcagatcacaaagttatttctgctgaattacaaatttgcaggaaaatccgcaggcaattcgctcgccgggcaattaatgacctcgtcattatccgcgccacagtcgcgaatgaaggtgatagtggcgaactcgtcaatcacttccgtcgggtaggccgggccggcatcgcgatacgaattcatcagcggaatatggtcgttctggaagcagatagttttttccgggttattcatgatccagcgcgggaagaaaatagtgccgtggaacagtttgtcgcccaggttgacgatcaggctgacgtcggtgccggtcggttcggtccaggagattttgtagatactttcccccacccgcacaatgtacgcttcctgatctttcacccagcgattgccgacgatgccgctgtgaatacggtagtcgagggtgtggccatttttgacgtaaatctcgtagttccagccgttgtcgtaggtatagaccagatgtttaccgataaagccgctgaggtcatgtttgtcgaaagtgctcatcatttattctcctctgttttgttgaggacagcatacgtctttaaaaaatgaatgaataacgctatgtttggattaaatacattcaaattttagattgattatgcacaagacaaccctggagcagtgggcgttactcgaaaaggtagtggaattggggagctttgccagagcggcggaggagaccaatcgcagtcagtcatcggtaagctataacctcgcgctgctgcaggagcgcttaggcgtggcgctgctggcgccgtccggccggcgggcggtgctgacgccggctggcgaactactgctgaatcaggtcaagccgctgctgcaggccttcgcctacgtcgagacgcacgccgccactctgcgcaacggggcgcggacccgcctggatctggtggtcgacagtattttcccgcgccagcggctgttcgcgattttacgccagtttcagcagcgctatccgcagacccaggtcaggctcacagaagtgctggaaaacctggatgacgagagcgcggcgcggacggaagccgatgtgatggtgctgacccgccgccaggatattaccggccgcggggagtggctgatgaatattgatttcattgccgtcgcccaccgcgaccaccctctcgccgcgctggacggacctctggaggatagcgcgctggcgccgtggccgctggtgcgcattgccgatcagggcggcgatggccaggcgccgcgagacgcctggaccttctccaccattgatgccgccattgatgcggtgatgtatcaggtcggcttcggctggctgccggaggagcgcattcgcccccatctcgaccagggcgtgctgaagcggttgcccctcagccatggcgcgcgccgcgcgacgccgctgcatctgatcgtcaagcgggacctggcgccgatcgacgaacaggtggccacgctgctggcgttgttccggacgccctgaggggtaaggcggcgctggtcgcctgggcgtaatgatacgattttcttatactttccggcgcaatattgatccaggttactcccaaagtatgatgaatcactaaaatcgtcatactttcctgtcgttgagattgccgtcttgtctattatccgcctcaccctgctggcgctggtcgcttgcgtccctctgctggctcaggccgcgccgtaccagctcaccaccgcctggccggttaacgtcggcccgctgaatccccatctctatacgcccaaccagatgtttgcccaaagcatggtctatgaaccgctggtgaagtatcaggctgacggcagcgtacagccatggctggcaacccgctggcgtcactccgccgacggaaaaacctggtggttcaccctgcgcgacgatgtggccttctccaacggcgaaccgtttaacgcccaggccgcggcggccaattttcaggcggtgctggccaaccgccaacgccacgcctggcttgagctcgccaaccaaataaccgacgtgcgggccctcagcgccaccgagctgcagatcaccctgaaaagcgcctacgcccccttactgcaagagctggccctgccccgcccgttccgcttcatcgccccctcgcagtttatcgatggcggcaccgccaggggcattaaagccccgatcggcaccggcccgtggcggctggcaagctcgcagctcaatcagcgcgatgtgctggtgcgcaatgagcgctactggggtcgcaaacccgcgctacagcaaatcaccatcaaggtgatccctgacgccaccagccgggcggtggcgttcgaaaccggggaaatcgatatgctctacggcgatgaagggctgctgccgctggacaccttcgaacgctttcgccatcaccccggctacgtggcgcgcctgtccgccccggcggagacggtaatgctggcgctaaacgccagccagggcccgacccgcgagctgacggttcgcgaagcgctcaactacgccgtcgataaacagacccttgtcgatagcgtgttgtatggcacccagcaggttgccgacaccctgtttgccccctccgtcccttacgccccgcaggatctgacgccgcgccgttacgacccgacaaaagcccgcgccctgctggaacaggccggctggcagcagctggagggccagccctggcgacaaaaagccgggcaaccgctggcgattgagctggcgtttatcggcaccgacgcgctggctaaatcgatggccgaaattattcaggccaatctgcggcaggtcggcgtgcaggtcaccctggtgggcgaggaggaaagcagcatttacgcgcgccagcgcgaaggccgcttcggcatgatcttcaatcgcacctggggcgcgccctacgatccgcatgcctttttaagctcgatgcgcgtcccttcgcatgcggattaccaggcccagcgcggcctgccagacaaggcactgattgataaagagattagtgaagtgctgaccaccggggacgaggcgcagcggagaaaactgtaccatgatgtgctgacccgtctgcatcaggacgcggtgtatctgcccatcagctatgtctcgctgatgtcggtcgcgcgccaggaggtcggggagatcccgttcgccccggtgaccagcgagatccctttcgaccagattaccccggtaacgccataatgctacgctatattttacgccgcctgctgctgctgatcccgctgctgctcgccgcctcagccatcatctttctgctgctgcggctcggcgccggcgacccggcgctggattatttacgcctgtcgaacctgccgcccactgaagagatggttgcctcgacccgcgagctgctggggctcaaccagccgctggcaatgcagtatctgcactggctatggcgggcgctgcacctggatttcggtctctcctatgccacccagcgcccggtgctggacgacctgctgcacttcctgccggccaccctgctgctcaccggcgcggcgctggcgctgatcctcgtcacctccctgccgttgggcatctgggcggcgcgccatcgcgatcgcctgccggactatatcgtacggctgattgccttcctcggcgtctcaatgcccaacttctggctggcctttctgctggtgatgctcttttccgtgcatctgcagtggctcccggcgatggggtatggcgactggcagcacctgattttgcccgccgtctccatcgcctttatgtcgctggcgatcaacgcccgcctgctgcgcgccagcatgctggacgccgccagccagcgtcacgtgatatgggcgcggctacgcggattgagcgcgcgccaggtggagcgccgacatatcctgcgcaatgccaccctgccggtggtgaccgccatgggcatgcacattggcgagctgatcggcggcaccatgattatcgaaaatatctttgcctggcccggggtcggccgctacgcagtttccgccattttcaatcgcgattacccggtgatccagtgctttaccctgatgatggtgacggtgttcgtgctggctaatctggcggtagatgtgcttaacgcggcgctcgacccgcgcctgcgccgccacgaggaggtgagcgcatgagagggctacaaagctttcgctggccggtaaaactggccatgctggttatcgcgctgctggcggtcatcgccatcggcagcggctggtggctgccctgggatccagcggcgattgaccttcagcagcggctgctaccgccgggcgcagcgcactggctcggcaccgatcatctcggccgggatattttctcacgcctgctggccgccacccgcgtttcgctgggggcggtgatggcttgtctgctgctggtgctgctgatcggcctggcggtcggcggctgcgccggactgctgggcggccgcgccgaccgcggcctgatgcgcatcgccgaactgtttatgacttttccgacctcgatcctatcgttctttatggtgggagtgctgggtaccgggctgaccaatgtgatcctcgccattgcgctgtcgcactgggcctggtacgccagaatggtgcgtaacctggtggtttccctgcgccagcgcgaatttatcctcgccgcccgtctgagcggcgccagccagtggcggctgttcagcgaccatctggccggcgcggtgatcccctcgctgctggtgctcgcctcgctggatatcggccatatgatgcttcacgtagccggcatgtcgttcctcggtctcggcgtcagcgcgccgacggcggaatggggggtgatgatcaacgacgcccggcagtatatctggacccagccgctgcaaatggtctggccggggctggcgctgttcatcagcgtgatggcttttaacctgctgggcgacgcgctgcgcgatcgtctcgatccccacctgatcgcggagcatagccactgatgccgcagaagatccaactggaacagatctcgcttgccgctgaccgaccgctggtcagcgacgtctccttcaccctgcgccgcggccaggtgctggcgctgctcggcagcagtggttgcggaaaatcgctgacctgcgccgccgcgctgggcctgctgccgcccggcgtcaggcaaaccgccggccgggtgcttctcgacggcattccggtgcacggcgaacagctgcgcggggcgaccatcgccaccatcatgcagaacccgcgtagcgcctttaacccgctgcagaccatggccgcgcatgcccgggaaacctgccgggcagcgggtcgtgaaacgaatgacgccgtgctgctggcagcgatggaggaggtcggtctggacaatccgcgggcgctactgaagcgctacccttttgaaatgagcgggggcatgctgcaacggatgatggtcgctctcgccctgctcagccgcgcgccctttatcatcgccgacgagccgacgaccgatctcgatgccatcgcccaggcgcgcatcctcgacctgctggcggatattgtcgccaggcgcggtctgggactgctgctggtgacgcatgacatgggcgtcgtggcgcggctggcgcatcacgtaacggtgatggagaacggtcgcctcgttgaacactgcgatgtgaatacgctatttagcgccccgcggcacccgctcagccagcgcctgctggccgcgcatctggcgttatacggtctggagaaaacaccatgaatttactcagcgctaccggggtgagtcacgattatcctcaccacggcagggtcctgcatgcgatccatctcgccatcgcccccggcgaaacggtggccctgctcggacgcagcggctgtgggaaaagcaccctggcgcggatgctggtgggtctggaaacgccgcagcacggtgatattgcctggcgcggcgcgccgctgactgccctgaagggcgaggccatcggcgccttccgccgtgatattcagctggtatttcaggatgccttcagcgcggtgaatccgcgcaaaacggtgcgcgagatcgtcagcgagccgctgcgccttctgttgtgcttgtcgcgtgaggcgcgtgcgcggcgggtggaagagatgctgctggccgtcgacctcgcgtcgtcgctgctcgataagcgcccggcgcagctcagcggcggacagctgcagcgcgtctgcctggcacgcgccctggcggtacggccgcagctgttgatccttgatgaagcggtttcaaatctcgatctgctgctgcaggcggagattatcgccctgctgaagcgtctgcaggcgcagtttgacaccgcctgcctgttcatcacccatgacctgcggctggtggagcgcttttgccagcgagtgctggtgatggagcacgggcgcatcgtcgaaaccgcaacggttagtctaccgctacgcctgcgctcccctgccggacaggcgctccagcaggcggtgctccccccttttcctgccactctgcttaacgaggccatgccatgcagcgcgtaaccctgacccttgatgatgacctgctggccgccctcgatgcgctcagcgcccgccgcggctaccacaaccgttcggaggcggtacgcgatattctgcgcgacgccctcaaccaggatcctccgtcgccggaatcacggcgcgggtatgccgttctgtcgtacgtgtatgaacatgagaaacgcgaactggcgagccggctggtggccacccagcatcatcatcacgatctctccgtcgccacgctgcatgtgcatatcagtcatgacgactgcctggagattgcggtgctgaaaggtgatatggccgaggtacagcattttgccgacgacgtgattgcccagcgcggcgtgcgccatgggcatttgcagtgtttagcggatgattaattatttgaaaattcttgggtggtttatcaacagttgataaaccacataaactatacgctttgtgaattatccctcttcgccaataatggcgcctcatttaacgatctcgttatggcgaggctcctgcataaatacaagttaccgccctgttggtatcgagagagaccactcagggaaatacaggcttccatcgaatcaaggtgttgccaaggtaacttctggcggtcatgaccgttcagatacgttatgcagtgctaaaaccaggacgtagggatctgcctgcgctaaccctgtcttgttcgcccctatgagtgattttttatagggatttttaaacatgtcttccattcaactctgcgccgcccatcaggcgacctctggcttcgacggcgatgcgatcgtccagtacatgcgtaccgattttattacgctgcaggaacatctcagcgttcatgaggcgcgcgaacactttatctcccagctggccagcgatgatattcccgggcaggtgtttgtcgtcgccggcaagaagctgcgtggcagcctgtcggtcaaaaagctactccaggaaacggatatcaaccagtctatccgccacctgatggacagctgcctgtttcgcgtcaaacctgacgatgagcgccagcaggtgattgccgagctcagcgagcgcggcctcgacctggtccccgtcgtcgataaaggcgagctggtcggctgcctgatggagaaggagatcgcccatctgctggaggatgacgtcaccgaagatgctcagctgcagggggcaacgctgccgctggaaaaaccgtacctcgagatcagcccctggacgctgtggaaaaaacgctcggtgtggctgctgctgctgttcgtggccgaagcctacaccagcagcgtactgcagcatttcgaagaagccctggaatcggccatcgcgctggccttctttattccgctgctcatcggcaccggcggcaacagcggaacgcagatcacctcgacgctggtgcgctcgatggcgctgggggaagtgcgactgcgcgatatggggcgggtgatccgcaaagaggtatcgacctcgtttctgattgccctgaccctgggcctggcgggctgcctgcgcgcctggatgatggggattggcatggaaatcacgctcatcgtcagcctgacgctggtgtgcattaccctgtggagcgcgattgtctcctcggtcattccgatggtgcttaagcggatcggcattgacccggcggtagtttccgcgccgtttatcgccacgctgattgatggcaccgggctgattatctatttcaaaatcgcccagtattttcttgggttgaactgatcatatacgtccgggcaccagggcgcccggacgcgtagattacccttccaccagcgcctgcgcgcaggcccaggcgcttgaccacgcccactggaagttataccccccgagccagccggtaacgtccatcacttcgccgataaagtagagacccggcgccttacgcgcctccatagtacgcgacgagagttcgttggtgtccacgccgccgagggtcacctccgccgtccggtagccttcggtgccgttcggctgcacgcgccaggcggttaacgtctccaccagcgtctgctgatcgcgaacgttcagttgcttgagcgtcacatcaggtatctgccccagctgctgcagacactccaccagccgcttcggcagctgcatcgccagggtgttcttcaggctctggttgggatgcgcgctgcgctgctcgttaaggaagtcatcaagatcgcagtccggtagcagattaacggtgacgaactcgccgggctgccagtagctggaaatttgcagcaccgccggtccggaaaggccgcggtgggtgaacagcagattttcgcgaaacagagtgccgttctcggcggtaatggtcgacggcaccgacacgccggagaggacctgcagctgctcaagcaatggcttgtggagggtaaacggcaccagccccgcgcgggtcggcagcaccttcaggccgaactgctcggcgactttatagccaaacggcgaggcgccgagccccggcatcgacagaccgcctgaggcgatcaccagctttttggtcaccagcgtttcgccgttcacctgtagccggtagccttgttcatcgcgctccacgctgaggatttcgctgcgcagacggatctgcacgccgcccttttcacattccgcgagcagcagattgacgatctgctccgccgaatcatcgcaaaacagctggccgagggtcttctcatgccaggcgatgccgtatttaccgaccagctcgataaagtcccactgggtgtagcgcgccagggcagatttgcaaaaatgcgggttttggctcaaataggccgccggttcaacatacatgttggtaaagttgcagcggccgccgccggacatcagaatttttcgccccggctttttgccgttatccagcagcaggacgcggcagccaagctggcccgcctgcgctgcgcaaaacattcccgccgctccggcgccaacgacaatggcatcaaacctttccacaccgcgttcctcgttccccaattgtcgggttttgtaaatatttcactctggtcacaccagcgggaaaaatcccgcattagatacatcattgaaagatataggattactcccaacagggtaaaacctaaacaggaagaaaatcaaaaaaagtctatatttcactttgcccgcgccgctaaagtcactgataatgcgccgcgttcatgtcctcaaaatggcgtaacgtcctatgctacatttatttgccggtctggatttacataccggactattattattgcttgctttagcttttgtactgttttacgaagcgattaacggtttccatgataccgcaaacgcggtggctacggttatctacactcgcgcaatgcgctcacagctcgctgtggcgatggcggcgctcttcaacttcttcggcgttctgctgggcggtctcagcgtagcctatgccatcgtgcatatgctgccgaccgatctgctgcttaacatgggttccgcacatggcctcgccatggtgttctctatgctgctggcggcgatcatctggaacctcggcacctggtacttcggtcttccagcttccagttctcataccctgattggcgccatcatcggcattggtttaaccaatgcgctgatgaccggtacttccgtggttgatgcgctgaatatcccgaaagtcatcggtatttttgcttcgcttatcatctcgccgatcgtcggtctggtgatcgcgggcggcctgattttcctgctgcgtcgctactggagcggaaccaaaaaacgcgcgcgtatccacctgacgcccgcagagcgtgaaaagaaagacggtaagaaaaagccgccgttctggacccgtatcgcgctgatcctgtctgctattggcgtgtcgttctctcacggtgctaacgatgggcagaaaggcattggcctggtgatgctggtgctgatcggcgtcgcgccggcgggtttcgtggtgaatatgaatgcctctggttacgaaatcacccgtacccgcgatgcggtcaacaacgtggaaaccttcttccagcagcgtcctgaactgctgaaaaaagccaccggcgtcgatcagctggtgccttctccggataccaataccgcggccaatggcgagttccactgccatccggcgaacaccatcaacgcccttgaccgcgtcaaaaccatgctgaccggcgttgagaactacgagtcgctaaaaccggaacagcgcggccagctgcgtcgcatcatgctctgcatctccgacaccaccgacaaggtggcgaagctgccggatgtgagcgctgacgaccagcgtctgctgaagaaactgaaaaccgatatgctgagcaccatcgagtacgcgccaatctggattatcatggctgtcgcgctggcgctgggtatcggcaccatgatcggctggcgccgcgtggcgaccaccatcggtgagaagattggtaagaaaggcatgacctacgctcaggggatgtcggctcagatgaccgcagcggtttctatcggtctggcgagctacaccgggatgccggtttccaccacccacgtactctcctcctcggtagcggggacgatgctggtggatggcggtggtctgcagaaaaagacggtgaccagcattctgatggcctgggtgctgaccctgccggcagcgattatcctttcaggcgtcctttactggctctccctgaaactgatttaagcgttattcgttcaaaacgggccagcttgctggcccgtttttttattctgaaacgttagtgccagatcatcagcgcaatcaggctcaccaccaccaggccgcacagggcgctggtcaggataaactggcgacgaacacgttcgcagcgacgaataaattcatcatcgtgatggtcacggtagcgctgggcatagatataccacaccagccgcatctgtttgctgggctgcccgtgcgaggtaaaaaagccgccgccatcaacatactgatagagcaagggatcgcaaccacgtagcaccaccaataatgcacgcaacgatgagaagtagcgtgccatattcaccacacaaacgacacacagggcccaaaacagcgcaatagtgctgatcatacctcctccccggcgacccgcctacggagaaaacctccgcggctaccgctccccaaataacccacgacgataccgtaaagagtgcgattccgatcacatttatttttccgaccggctcattaaatagtgtaggagatccattaatttttttaccacaaggttattcgttatcaatacgtaagacggataaatttgtttaacttttaggtgaacccagtgcattgacggagtgcggggggcgctataaggtaggaaatatcttctacaatgaagtccttaaaggctaccctcccgcgaatgtagcacgcaggacgcgggcgaaacggcagcgccagctgtcaggtccaatggtcatcgacaaacttatggaaggagtaacactatggcttacaaacatattctgattgcagtagacctgtccccggagagtaaagtactggttgaaaaagccgtttctatggcccgcccgtataacgcgaaagtctccctgatccatgtggatgtgaattactccgacctctacaccgggctgattgacgttaacctcggcgacatgcaaaaacgcatctccgaagagacccatcacgcgctgaccgagctctcgaccaacgcaggctatcccatcaccgagaccctgagcggcagcggcgaccttggccaggtgctggtcgatgcgattaaaaaatacgatatggacctggtggtctgcggccatcatcaggacttctggagcaagctgatgtcctctgcccgccagctgattaacaccgttcatgtcgacatgctgatcgtcccgctgcgcgacgaagaagacgaataaccgtctcgttttatccgcgcaatacgcccgccgatgcgggcgttttttattttcgctttccctcgccatgcggcagaacttcaatccataaaatcgccattcaattagtgtgatcaaccagttattcggcgaaatatctatataataatctattccataagccaataaccgcagcatggcgagttatcagacattttcggcgcgttctggcatacgcgttcatactttttgggaaagtaatacaaggcgaaggaatatgaatacaactgcacctacgggcttgctgcagcaacctcgtccgttctttatgatcttctttgtggagctctgggaacgttttggctattacggcgttcaggggatcctggcggtcttctttgttaaacagctgggcttctctcaggaacaggcctttatcaccttcggcgccttcgcggcgctggtttacgggctgatctccatcggcggctacgtgggcgaccatttgctggggaccaaacgcactctggtgctcggcgccattgtgctggctatcggctactttatgaccgggatgtcgctgctgaaaccgcagctgatctttatcgctctcggcaccatcgccgtcggcaacggtttgtttaaagccaacccggcgagcctgctctccaaatgctatccgccgaaggatgcccgtctcgacggggcatttaccctgttctatatgtcgataaacatcggttcgctgctgtcgctgtcgctggcgccggtgatcgccgaaaaatttggctacgcggtaacctataacctgtgcggcgcggggctgattatcgcgctgctggtctacttcgcctgccgcgggatggtgaaagatattggctccgagccggatcatcgccccctcagcctacgcaatctggcgctggtgctggccggtacggtggtaatgatttttctctgcgcctggctgatgcataacgtgatgatcgccaacctggtgctgattgttctgtcggtcgtggttattgcgttctttttccgtgaggcgtttcgcctcgataaaactggacgcaacaaaatgttcgtcgcctttattctgatgatcgaggcggtgctgttttacattctgtatgcccagatgccgacctcgctgaacttcttcgccatcaacaacgtccatcatgagatccttggctttaccatcaacccggtcagcttccaggctctgaatcccttctgggtagtggtcgccagcccggtgctggcggcgatctacacccatctcggtcataagggtaaagacctgaccatgccggtgaaatttaccctcgggatgttcctctgcgcgctgggcttcctgaccgccgcggcggccgggatgtggttcgccgacgcccaggggttaacctcgccgtggtttattgtgctggtctatctgttccagagtctgggggaactgttaatcagcgctctggggctggcgatggttgccgcgctggtgccgcagcatctgatgggctttattctggggatgtggtttctgacccaggccgccgctttcctgctgggcggctatgtggcgacctttaccgcggtgccggaaaacatcaccgacccgctgcagaccctgccggtctacaccaatgtgttcagtaaaattggcctggtgacgctgggcgtcacggtggtaatggcgctgatggtgccgtggctgaaccggatgattaatacaccggccagcgccgagtaaccgtttaagatggccgatccgcactggcgccgtttgttcagatattgtggttcccggcttgcgctacgctgagccgggcgacaattcggtagcccggataaggcgcgttgcgccgctatccgggagttaccaccacggcgtaatattactccggcgtaccggcgtaaatatcaaaccgatgccctttggtcaccaccgcattcggcgtggcgacttccgccagcggcggcgcgtaatccgggcgcttcaccaccacccgcttggtcgccagctggcgcgccggggccagcaggccatcggcgtctaaatccggccccaccagcgactgaaagacgcgcatctctttcttcaccagcgcgcttttctgcttatgcgggaacatcggatcgaggtacaccacctgcgggcgcggggtgatatcggttaacgccgtcaggctggaggcgtggatcagctgcagccgctcctgcagccagccgccgatttccgcgtcagcatagccgcgcgccaggccatcatcgagcagcgcggcgaccaccggattacgctccagcatccgcacgcgacagccgaccgacgccagcacaaaggcatcgcgtcccagcccggccgtcgcatcgacgacatccggcaggtaatcgcctttaatacccaccgctttagccaccgcttcgccgcggccgccgccaaacttgcgccggtgggccatcgccccgctgacgaaatcgacgaagatgccgccaagcttgggctcatcgcgcttgcgtagctccagatgctccgtcgtcagcgccagcgccatcgggttatcgtcatcctgctccagcccccagcgggcggctaaaacagataaggcgccgtcaccggcgcctgtttcatcaattaagcagatcttcacgtagcaatcagcctttgatcccgtaatgctccagcatcgcgtccagctgcggctcgcgcccgcggaagcgtttgaacagctccatcggctcttcggaaccgccgcggctcaggatattgtcgaggaacgactgaccggtttcacggttgaaaatcccctcttcttcgaagcgtgagaaggcgtctgccgccagcacgtcggcccacaggtagctgtagtaacctgccgcatagccgccagcgaagatgtggctgaaggcgtgcgggaagcggccccaggtcggccccggcaccacggcgacctgctttttaatctcggccagggtctcaaggattttcgctccctgctccggtttgtactccgcatgcaggcggaaatcgaacaggccgaactccagctggcgcagaataaacatcgccgcctggtagtttttcgccgccagcattttctccagcagctcctgcggcagcggttcaccggtttcataatggccggagataaacgtcagcgcttccggctcccagcaccagttctccataaactggctcggcagctcgaccgcatcccacggcaccccgctgatgccggaaaccccggcggtgtcgatgcgggtcagcatatggtgcagaccgtggccgaactcgtggaacagggtgatcacttcgtcatgggtgaacagcgccggcttgccgttgaccgggcggttgaagttacaggtcaggtaggcgaccggcttctgcagggaaccatccagtttacgcatctggccgacgcagtcgtccatccacgccccccgcgcttatgttcgcgggcatacaggtcgagatagaagctgccgcgcagctcgttgtgttcgtcatacagctcgaagaagcgcacttccggatgccacacatcgacatcggtacgctctttagcggtaataccgtaaatgcgcttaaccacttcaaacaggccgctaacggctttgttttccgggaaataggggcgcagctgctcatcgctgatgctgtagaggtgctgcttctgtttttcgctgtagtaggcaatgtcccacggctgcagctcatcgacgccaaactcggctttggcgaaggcgcgcagctgggccagctctttttcgccctgcggacgggcgcgttttgccaggtcggtgagaaagtcgagcacctgctgcggatccttcgccattttggtggcgagggatttatacgcatagctgtcaaagcccaacagctgcgccagctcgtgacgcagggcgaggatctccgccatcaccgggctgttatcccatttcccggcgttcgggccctgatcggaggcgcgggtggaataggcgcgatacatctcttcgcgcagcgcctggttatcgcagtaggtcatcaccggcagatagctcggaatatccagggtcagcagatacccttcctgctctttggcctgcgcctgagcctgagcggcggccagcgcgctttccggcatgccggccagatcggcgacatcggtcaccagcttgttccagcccatggtggcgtcgaggacgttgttgctgtactggttgcccagctcagagaggcgcgcggcgatttcaccgtagcgtttctgcgcctccggcggcaggccaatcccggataattcaaaatcgcgcagcgcgttatcaaccgcttttttctgcgcggtattcagcgtggcgtagttatcaccatcgcgcaggtcgcggtaggctttatacaggccttcatgctggccgacccaggtgctgtactcggagagcagcggcagcgtctgttcgtaggcctcacgcagttcagggctgtttttaaccgaattcagatggctgacaggcgagaagatgcgtcccagcacatcgtccacttccgccagcggctggcaaagattttcccagctatacggcgcgccatgcgccaccgcgctttccaccgcggcccggcaatcctccagcgctttggtgaccgcagggaccacgtgctctggtttgatcgcagaaaaaggcggcagggagaaaggcgtcaataatggattggtcatatgcgctgtcctgttgaaaagggtgaatgaagcgcgcgtccggcgcttatgcatgagatctagaatgggggatagttgggggaatttcaatgacgggcggtgcgtcagcctgggtattgctgcgataagtccgcccgttgccggaaaagcgcgacacgcagtgcagcgtgccggaaaccacattaatgccttttttgcgccatctcccaggccgccgacagattcagccgctgccagaattgctgttcgggggtggtgccggatagcgggtaacccgccggcagcgcggtgttgaccatcagcgcccgacgctgggccgctgacagatgcggcagggcatcttccagcagcacttccgccccctccggcacctgtaaacgcggctgcggacccttctgctgcggcagatcgtaggtcatggtgaagcgagagaaatcacgcatcgccggatcgcgccagggatcgtctttcacgctgctcttcgcgcactcggcaagcgatgtgccgcaggccttcgccagcgcggcgcgcagctgatcgcgggcttcgttaaataatacccggtagtgcggatcgttaagatagtgggccacgttgcgctcggccactatccgcgagccgatcacgtccagcgggtagtggacgcccagcacgatgcgcgagtagccatagcgggcgccgcgcgccaccagcgcgtcgtagcgctccgggatcatcgccgccagcagcagcgcatcggtatagccggtgttggtgtggccgctgggaaacgagccgccgtcggcggtgtagggctggttatctttcaccaccacatcgtcaggcaccaggtgaatggtgttgccctgcaccagaaacggccgcggattattgaagtgctttttcgcctcgccggtgctgacctccgaggctttgatcaacgctgccgctttccccagcgcgccctggtcataggcggtcagaaacgctttgccaaggcgtggccccagcgcatcgctgaggaagtagaggtagctaatgccttccgcatcggccagcgcctgacggcgcgtggtctgcacggcgtcgcgattgatggcggtcaccgtcgccagattctgcttcacgacggtctccggcagggtgctgaacgccgacagcagcgcaatgcccgcctgctggttggcccgggtctggaagtcatagccgctggccttcagccaggcggtatcggcctgagtttggttttgtttggtgtgcgccagccgatcgcgggtcagcgtagcggcattcccctgcagagcgtggcgtagctgcgccagcgcctgttgctcaagatcgtcatacgcctggctggaggcagccggcgtcacgctattggcgagggccgccgccctgttcagcgggatgtctttagccagaaccggttgcgccagcagcagcgcgacggccagcagcgagagttgccttttcattatttttccttttattcaaataattaccttgcctgtacccgacgctagcgcggccgtttgacgtttttatgacagcgttatgttttgcaacgcttttggcagaaatgaaacagcgcggcggcgcagcggtaatctcggccgatctgcggtaaactatcggttaacttgtttacttcccggaatctctgcatccatgctcagttatcgccacagctttcacgcaggcaaccacgccgacgtcctcaaacacaccgttcagagcctgatcattgaatcactgaaagagaaagaaaaaccgtttctctacctggacactcacgccggcgcgggccgctatcagctgagcggcgagcacgccgaacgtaccggcgagtatcttgaaggcatcgcccgcatctggcagcaggacgacctgccggcagagctggagccgtatatttcggtcgtcgaacacttcaaccgtaacggccagctgcgctactacccgggctcgccgctgattgcccgccagctgctgcgcgagcaggacagcctgcagatgaccgagctgcacccgagcgacttcccgctgctgcgcgctgaattccagaaagacagccgcgcgcgcgtcgataaagccgatggctaccagcagctgaaagccaagctgccgccggtatcgcgccgcggtttgattctgatcgacccgccgtacgaaattaaaaccgactatcaggcggtggtcaccgggattaacgaaggctacaaacgcttcgccaccggcacctacgccctgtggtacccggtggtgctgcgcgcgcaaatcaaacgcatgatcaaagagttagaagccaccggcattcgcaaaatcctgcagattgagctggcggtgcgtccggacagcgaccagcgcggcatgaccgcctccgggatgatcgtcatcaacccgccgtggaagctggagcagcagatgaataacgtgctgccgtggctgcacagcaaactggttccgaccggcaccggccacgccaccgtcagctggatcgtaccggagtaatcgcaaccatcggtggaaccttttaagcctcgcgctacaatcgcggcaatcaacgattaaggacatatgggcatgagcaaacattatgattacctcgccatcggcggcggtagcggcggtatcgcctcaattaaccgcgcggccatgtacggccagaagtgcgcgctgattgaagccaaagagctgggcggcacctgcgtcaacgtcggctgcgtgccgaaaaaggtgatgtggcatgcggcgcagatccgcgaagcgattcatctttacggcccggactacggtttcgataccaccatcaaccattttgactgggagaagctggtcgccagccgtagcgcctatatcgaccgtattcatacctcttacgacaacgtactgggtaagaataaagtcgacgtgatcaaaggcttcgcgcgctttgtcgatgcccacaccgtggaagtcaacggcgagatcatcaccgctgaccatatcctgatcgccaccggcggccggccgagtcacccggatattccgggcgtcgaatacggtattgattccgacggtttcttcgaactgccggcgctgccgaagcgcgtggcggtggtcggcgcaggctatatcgccgttgagctggcgggggtgattaacggcctcggcgccgaaacccacctgttcgtgcgcaaacacgcgccgctgcgcagtttcgatccgctgatcgttgagaccctggtggaagtgatgaacgccgaaggcccgcagctgcataccaatgcgatcccgaaagcggtggtgaagaatgccgacggcagcctgacgctggagctggaagatggccgcagccagaccgttgactgcctgatctgggcgattggccgcgaaccggcgaccgacaacttcaatctggcggcaacgggcgttaaaaccaacgataaagggtacatcatcgttgataaattccagaacaccaacgtgccgggcatctacgcggtgggcgataataccggcgccgttgagctgacgccggtcgccgtggccgcaggccgtcgtctctccgaacgcctgtttaacaacaaaccggaagagcatctggactacagcaacatcccgaccgtggtcttcagccatccgccaatcggcaccgtcggcttaaccgagccgcaggcgcgcgagcagtacggcgacgacgccgtgaaggtctacaaatcttccttcaccgcgatgtataccgccgtgacctctcaccgtcagccgtgccgcatgaagctggtgtgcgtcggcccggaagagaagattgtcggcatccacggcatcggcttcgggatggatgagatgctgcagggctttgcggtggccctgaagatgggcgccaccaaaaaagacttcgacaacaccgtcgccattcacccgacggcggcagaagagttcgtcaccatgcgctaagacgcgatcgccggatgataaaaagaagcccctgggggcttctttttttatgctcaggccacgccgttattgccatggcgcataaacgccgggcgctgattgagcgccatataccagcgctccacggctggcatctccggatgggcgaaaggggtcattttccagcgatgcaccgacagccccagcacgatatcggccagggtgaagcgctcgccggctatccacgccccggtacgctgcagctgcgcttcaacaatgcgcacgcagtgggtccaggcggcaatactctctttaatcgccaccggatcctgaaagcgcggatctttacgcaccagccccataaaagcatggcgccaggcagtattgaactcggtcgcctgccagtccatccagtgctccacctcggcggcgggctgcggttcggcgggcagcagatcccagcgctccgctttgcgcgccagatagcggcagatactgttcgactcccagagcacgaagtcatcgtccagtagcaccggcaccaggctgttaggattcagacgctgaaactcaggcgtatccaggggcttaaatccgctgccgtaatcttcctgctggtacgccagcccggcttcctcgcaggtccacagcactttccgtacattaattgaagagcgtttacccagaatttttagcatcgtcagcgattcctcagccataaaagacagttcattcactctactctattgccagccagcaacaaggcagagcgctggataatgtgtatagttgattccagcctgtttgccgaaaaggaacccgacatgttgaccccttttaccgttttgatgcctgcaaatattcgttttggccgtggtcaggccgagagcgccgccccctggctggcgcaacagggcggcccaatcctgctggtgcatggcgccagcccgcagcgggctgcgtttctccgccagcagctggaggcgctgcagcttgcggtcacgacgctggcgataagtcgcgaaccctggcttagcgatatcgagcagggcgtccagctggcgcgcgagaaagggatcagagcggtggtcagcctcggcggcggcgcggtgattgacgccggtaaggcgattgcggcgctggtccccgccgccggcccggtgatcgactatctggaggtggtgggaacgggccgtcagctggaagtcagtcccctgccgttcgtggcgatccccaccaccgctggcacgggcgcggaggtcaccaaaaatgcggtgatcaacgttccggaacagcagcggaaagtgagcctgcgcgacgaccgaatgctgcctgacctggcgattgtcgacccggcgctaaccgacaacgcgccgcggagcatcaccctgagctccggcctcgacgccctgacccaggtgatcgagccctggctctgcagccgggccactcccttcaccgatgctctctgccagcaggcgatcccgcggggaattcgcgcgctaaaaatcctgatggaacaagagtgtccggccagccgcgacgagatggcctgggtcagcctgtgcggcggactggcgctggcgaacgccgggctgggggtgatccacggcctcgccggcccgctgggcggcctgagccgcgcctcgcacggcgccctatgcggcagtttgttgccgtttggcctggcgctcaatgagtcgcagatcaacgaccctggcctgcgccagcgcgttaacgatgtccgccgctggctggccgacgggctggacgtccctgtggatcaggtctgggacagtctgcgggaatggagccatcgcgctggccttggcaccctgcgcgacctcggcgtagcgcgcgatgcgctggaaccggcggcgctggccgccagcacctcctcatcgatgaaggccaacccggtcagcctgagcggcgaacagctgctggagatgctggaggcggcgtgggagtgagcgtcccgggataaaattttgttgcataatgaatgctccgaatttcatctgcgccaggatctacaatttttaattacttatcaacagcatactttgaaatggcagcttttcttctcggcggaaaagcgtgatctcacgcacagtttgcttcacactcaccgaagcgactgtctacgcttaatagacaaggccgggtatgcccggccccgaactcacgctatccggaggtccgtatcgctatgttcagccagaaattacgccacgttgaagacgacgagttaaggatcgacatcgatccctgctacgaagccgatccgtacgaattaaagctggatgagatgatagacgctgaaccggagcctgaggtgatcgaggggcttccggcgtccgatgccctcaccccggcggatcgctatcttgagctgtttaccaacgtgcagaaatcacgcattttcgcggacagcaaaaccttccccgactgcgcgccgaaacacgatccgctggacatcctgcggaactaccgcaaggtcaaacgccagcccgacttcgatctgcggcagttcgttgaggacaacttctggctgccggagagccagagcgacatctatatctccgaccccagcctgaccctgaaagaacacatcgacaagctgtggccggtgctgacccgcgagcctcaggatcatatcccgtggtcatcgctactggcgctgccgcaggcctacatcgtgcccggcggtcgctttagcgaaacctattactgggactcttatttcaccatgctggggctggcggagagcggccgggaagatttgctgaaatgcatggccgataactttgcctggctgattgaaacctacggccacattccgaacggcaaccgcacctactacctcagccgctcgcagccgccggtgttcgccctgatggtcgaactctttgaagaggatggcgtgcgcggcgcgaagcgctatctggaccatctgaagatggagcacgccttctggatggacggcgccgagtcgttgatcccgcaccaggcgtatcgccacgtggtgcgtatgccggatggctccctgctcaatcgctactgggacgaccgtgacacgccgcgggatgagtcgtggcgcgaagacgtggagaccgcccgacactccgggcggcccgccaatgaagtataccgcgacctgcgggcgggcgccgcgtccggctgggactactccagccgctggctgcgggatatcacgcggctggccagcatccgcacgacgcagtttatccccatcgacctgaacgccttcctgttcaagctggagacgaccattgccaacctctccggcctgaagggcgatcgcgagacggagacggccttccgccagaaggcccaggatcggcgggcggcggtcaaccgctatctgtgggatgatgagaacggctgtttccgcgattatgactggcgccgtgaacagctggcgctgttttccgcagccagtatcgtcaccctttacgtcggcctggcgacccacgaacaggcagaacgccttgccgatgcggtgcgggcccgcctgctcacccccggggggatcatggccaccgaatacgaaagcggtgagcagtgggataaacccaacggctgggcgccgctgcagtggatggcgatccagggatttaaacgttacggccaggatccgctgggagatgagattgcctggagctggctgcagacggtcaaccacttttacaagcagcatcacaagctgattgaaaaataccatattgccaccggcgtcccccatgagggcggcggcggggagtatcccctgcaggatggctttggctggaccaacggcgtggtgcgccgactgattggcctgtacggtgagccaacctagtcgggctgttcccggcggctttctcctgctatgttcagaggattcgccctgcccggaacgacgcttatgcctgaacttctgacgccgcgcctgcgctgctcaccgctgcagctggacgactggtcgttttttctttccctgcagcaggatccgcaggtcatgctctacgtcgccgatccccgaccgcaggcggccatccgcgaggcgttcgattcgcggctgccgccgtggacgcccggggatgaacactggctgtgcctggtggtgcgcgacaggctgacccataccccgctcggcctgaccggttaccagcatcatcagcgcgacattgccgaggttggctttctcttcgccccggcggcgcagggtcggggctacggctacgaatcgctgcgcgcgctgtgcgactacgcctttaccaccggcggcgtccgccgcctgaccgccagcgtcaccgccggcaacgagacgtctaagcagttactgctcaaagccggcttccggctggagggggagctgcgggaaaactactggctcaacggacgctggcacaacgactggctgttcggtcggctgcgtggggagggcgatgcgccgtagcgcaccgccggtcacaggctgggggcagtcaggatcagaggaacatcccgcccgagacttccacacgctgcgcgttcatccacgccagctcatcgctgagcagggcggcgatggcgtcgccgatatcatccggcagcccaacgcgccccagcgcagtctgggcggcgatatgccgattcacctcggcgttatcgcgcacctccccgccgccaaagtcggtctcaatggcccccggcgcgatgatgttcaccgatatcccccgtccgcccagctctttcgcctgatagcgggtcagaacctccatcgcccccttcatcgcggcgtaggccgcatagcccggcagggcaaagcgcgccaggccgctggagacattgaggatacgccccccatcctgcaggagaggcagcagacgctgggtcaggaaaaacggccctttgaactggatattcatcagctcgtcaaactgcgcttcgctggtctcggcgaagggcgcgttgagtccgatcccggcattgttcagtaaataatcaaaggtagtgcgtccccacttctgcgccagcacctgcgccacctcgctggcgaatgcgtcgaatgttgtggaatcgccgacgttcagcgctaatgctgccgctttgaccccttttttctctatttccgccaccacgtcgagggccgcctggcggttgctgtgataggtcaaaagaatatcggttccctttgccgccagcttcaacgcggcgtttttacccagaccgcggctgccgccggtcactaaagcgatacgttgtgtcatcagaagacccctttcaggttgcgttgtgattgtgttgtagcttattaactgctcatgcaacaataaatacgctacattgcgttttactgtttcattaacaacaacaataggcgatcggcatggataaaattcatgcaatgcagttattcattcgcgtagcggatctggagagcttctcccgcgccgccgagaccctggcgctacctaagggtagcgtctcgcgacagattcaggccctggaaagccatcttggcgtgcggctcctgcaccgcaccacccgccgggtccagctcacccaggatgggatggtctactacgagcgggcgaaagatctgctgagcaacctcgacgaactggacggcatgttccagcacgatccggcgagcatcagcggccggctgcgggtggatatgccggtcggttttgctaaaaaaatggtgatcccgcatctgccgacttttttacagcagtatccgggcatcgaactggagctgagcagcagcgatcggctggtggacgtgatccgcgaggggtttgactgcgtggtgcgcgtcggcgcgctcaaagactcagggctgattgcccgcccgctgggcaagctgacgcaaattaactgcgccagcccggactacctggcgcgttttggctatccgcaatccctggaggatctggcggatcatgccctgatccactacgccagcaccctcggggtccgtccccccggctttgaggtaatgatcgacggcgcggtgcgctgggtaaaaaccggcggcatattgacggtcaacagtacggaaacctatcaggcagcctgtatcgccgggctggggattattcaggtgccacgcaccggcgtgcgcgaggcgttacgcgccggcgacctgattgagatcctgccccagtaccgcgccgagccgctaccggtctcgctgatctatccgcaccggcgcaatctctcccgccgggtaaatctgtttatggagtggctgggcggactgatgaaagcgtatgtcgattgagcggcgcggctgaaaaacgggcggtggagagaggcattcctgcaggatacggcatttaaggtatactttttgctgaatctcgctgtaaaaaaggaagaaattacgtatgacgccggaaaacgacgatcgacgcccgccacaggaaccggatacgcagccggagaaaagcaaaagcacgctcgaggccctcaatgacaccgcagtcgggcaaaaagccagccaggcgctgaagaccgtcaccggaacggcggccaaagtgcagcgcaacccggtgatcgcccatctgttgcgcgccgcagagcgcttcaatgaccggctcggcaatcagtttggggcggctatcacctatttctcgttcctgtcgatgatcccaatcctgatggtctcctttgccgccgccggcttcgtgctggcctggcacccaaccctgctgcaggacattttcgacaaaattctgcaaaacgtcagcgacccaacgctggcggcaacgttgaaaaacaccatcaacaccgcggtgcaacagcgcaccgccgtcggtctggtcggcctgctggtcgccctctattccggtattaactggatgggcaacctgcgcgaagcgatccgcgctcaatcgcgcgacgtctgggagcgccggccgcaggacgaggagaaaatctgggtaaagtacttccgcgatcttatctcgctgatcggtctgctggtggcgctgattattacgctgtccatcacctccgtcgccggctccgcccagcagatgattatctccgcgctgtatctcgacaacattgaatggctgaaacccgcctggcggctaatcggcctcgccatctcgatttttgccaactatctgctctttttctggattttctggcgcctgccgcgccatcgtccgcggcgcaaggccctgtttcgcggcacgcttatcgcggcgattggctttgaaatcataaaaatcgtcatgacctggacgctgccggcgctggtgaaatccccctccggggcggcgttcggatcggtgctggggctgatggcctttttctatttcttcgcccgcctgacgctattctgcgccgcatggatcgccaccgcggagtataaagacgaccggcggatgccgggcaaaacccaccgctgaggtattgcgaggatgaataaaagaggcaaaattcatcctcgcgcttgatttcagcagataaatccagcatgtaacttttatttaactcaaaactggttttattcnnnatctttttaattgcgtgaagcatttcatagaactatttttactggtgtaaaaattatccgctttttgcctcttttttgcccattttccgcgtttgttacagattgaaatgtccctgtggctgtggctatatggcttttcgttcgcgcaaaaataagaaagatctatgcaagccacagccaccactctcgaaaacacgcaggaaaccgccccggtcaactcacgcaacaaggttgttgtcgcctcgctcattggcaccgccattgagtttttcgacttctacatctatgccaccgccgcggtcatcgtcttcccgcatatctttttcccgcagggcgatgccgctgcggccaccctgcagtcgctggccaccttcgccatcgccttcgtcgcccggccgatcggctccgcgctgtttggccacttcggcgatcgcgtcggccggaaggtcaccctcgtggcctcgctgttaaccatggggatctccaccgtggtgatcggcctgctgcccggctatgaaagcattggcattgtcgcgccgatgctgctggcgctggcgcgtttcggtcagggccttggcctcggcggggaatggggcggcgcagcgctgctggctacggaaaacgccccggcgcgcaagcgcgccctgtacggctccttcccacagctgggcgcgccgatcggcttcttcttcgccaacggcaccttcctgctgctctcctggctgctgaccgaccagcagtttatggagtggggctggcgcgtgccgtttatcttctccgcggtgctggtgatcatcggtctgtatgttcgcgtctcgctgcatgagaccccggtcttcgccaaagtagcggcggcgaaaaaacaggtcaaaatcccgctgggtaccctgttgaccaaacacgtccgggtaacggtgctgggcaccttcatcatgctggccacctataccctgttctacatcatgaccgtctactcgatgaccttcagcaccggcgcggcgccgaatggcctgggtctgccgcgtaacgaagtgctgtggatgctgatgatggcggtgattggctttggcgtaatggtgcctgtcgccggcctgctggcggacgcttttggtcgtcgcaagagcatgattatcatcaccacgatgattattttgttcgccctgttcgcctttaaaccgctgctgggctccggcaatccgctgctggtcttcgccttcctgctgctgggcttaagcctgatgggactgacctttggcccgatgggcgcgctgctcccggagctgttcccgacggaagtgcgctacaccggcgcgtcgttctcctataacgtgtcgtcgatcctcggcgcttcggtcgcgccgtacattgccgcctggctgcagggtaactacggtctcgcggcggtcggcacctatctggcggcgatggcggcgctgacgctgatcgccctgctgctgacccacgagacccgccaccagtcgttgtgatccttcgccctgacgcccccggcgtcagggctctcctctactttttcatctgcgacaaaatggtccgacactggttgctatcgccctccgccggggagatcagcgccagcagcgcggcggccggcgtcaccagggttgccagcgccgccgctaccgcgccgcggacaatcagcggcccggccttcacccccgcctgcggcgatttaaaggtgccccggacatacagcggggaacgcagggtgatcacccgaaagcctttgctttccggatcgatggtcaggtccagctgctcggaggcgaagctggcggtcccggtcacattgatcagcgcgttttctgtatcgaaggcaaaaatctgcggccgggcgacgccattggttacgtcgatattggccgcggcgcagtttacccgaacctcctcatcgccaaaaatctggccgatcaggtagttaccgacgttaagaccgaggatttccatcaggttgcgactgatcagtccgtcgttcatcagcagcttcaggttaccgttgctgttgccgagcagggccgccaccgagttgccgctgccgcgcagctggacgtcgccattcatctcgccgagggttttctgcatcatctcgacgtttggcatcagcgccttcagcttcaggcgtcgcgcctgcagattggcctcaccctgcagcggctttttatcgccctgcaggtgtacgctgccggcaatcgacccgttggccaggccaaagcgcaccggctgcaggcgcaggtcaccatcctccagaatcacatgggtcgacagatcgctgatcggcagggtgccgccgtgctcaattctccggcccttaaagcgcacatcggcatccatcacctgccacttgtcggtttcaaagcggtccgccggcagcactttacccgccggctgcggccggtcccccgcctggcgcgaagcgcttttcttcgtccctttgccggaatcgacgccgattaatggcccgaggtccgccagacgcagctgcttcgactccatatcgccgctgagtttcggccgcggcttgccggtggtgtaggtcagggagccatgaatgtcgctatcgccgattcggccgttaaaattctgatagttaaagcgcatgcggtttttttgcgtaaagtcggcgcgcaggcggccgtcggtggagaatgacggcgtctccggcagcagcacgccggtcaggtcatagagatcgcgcagcgagtcgccggcgaattttagccgcaggtcaatgccgccgacgttgagcgggtcgctgaccgtgccgctgaacgctacccgggtgttaccggagtggaagtcgccctgcaatgggaagggggcgcttgcgctgcgcagggccagcatgccgccgattttcccgttgccggtgaccggctggcccttgtagcggcccttcagcgacagaccaaagacatagtcgcctggtttcgccgcgctatggctatcttttgtgccggtcacttcgctgaacggcagcggtttgccgaggggatcgacgaggatggtgatatcgctgcgggtgatcttgtcgtcaatggcgatagtcccgcgatcaaagagaatattatcgaggcgaaaggaccagctggagggcgcgctgtcgcccgaagtacgcttatcgcccgccagctgaaaggtccagttattgttgtcttccgccaggcggatcaaccgtacgtcgggctgctccagcttgatccacggcaggtacaccgttttgctcagcagcgccagcggggcaagggtcgcctccacccgcggcaaatggatcatggtcacctggggaatggccggcgggttgcccagcacgatatcctccgcgtgtacgtggggccacgggatccagctgcgccagccgcgctcgtccggctgccgctcccagaccacgccgagatcgccgcggatggcgaacgggcggttaagttcggcggacactttctgattgatcgtcggcttcagccggttccagtcaaaggtggccagcacgataaagaaaagaacgatcagcaatagtatcgttcctgtgatgataaccaacgttttacgggttctgctcatccctactccgctccttttgcatcacgtcagtcctgaatatagtcaaaaagcggcgtttatcctggaaatgcgcttttcgtcacattacgcgcgtcaggtcaaaaaaataatggaacgatgttttaatatgattgaccagcaaaacagcgcagcgcacactagcgcttatatcaattccattgcaggttctggctatgtctaaaaaaattgccgttattggcgaatgcatgattgagctgtcagagaaaaacggggccgttaaccgcggctttggcggcgataccttaaacacctcggtctatatcgcgcggcagacggatgccagcgcattgagcgtccactacgtcaccgccctgggaaccgatgcgttcagccagcagatgctcgacagctggcaacaggaaaacgtcaacaccgatcttatccagcggatggccgaccgcctgccggggttgtattacattgaaaccgatgacaccggcgagcgcaccttctactactggcgcaacgaggcggcggcaaagttctggctggagagcgatcgcgcggcggcgatttgcgaagagctggccactttcgactatctctatctgagcggcatcagtctcgccattctcagcccggccagccgcgacaagctgttcacgctgctgcgtgagtgccgcgccaacggtggcaaggtgatcttcgacaacaactatcgtccgcgcctgtgggccagccaggcggaaacgcagcaggtctatcaggagatgctcgcctgcaccgatatcgcgtttctgaccctcgatgatgaagacgcgctgtggggagaaaaaccggttgctgaggtgatcgcccgcacccacgccgccggcgtggaagaggtggtggtgaagcgcggcgcggatgcctgcctggtctcggttagcgggcaaccgctgcgggaagtgccggccgtcaggctggccaaagagaaggtggtggataccaccgccgccggagactccttcagcgccggctacctggcagttcgcctgaccggcggcgatgccgaatccgccgccagacgcggacacctgaccgccagcacggtgatccagtatcgcggggcgatcatcccgcgggaagcgatgccgcagtaattctccgcacaaagcgctctccggccgccgctggcgcgccggagaggcgttaggttactgccccggcgggatgtcgctggcctcgctgtgggcgtcaaccgtatcggcgctgccgctagccgccgtggccgccggattcggcgccatcagtttttcccaggtggcctgcagttccttcatattgtattccggttcgcccttcggctgttgcagcaccagcgccatgtcctgcgagagctgctggcgcagatactggttcagcatgtccaccgtcagggagttgaggaactcctgacgcagcttctggtactgctccggcgcgatgtccaccacctgattctgcagggagcgcatgcgctggctcatcagaatgtcggtgtcagtgcgcgcataggtggcaaacagcttctgcagctcgaggcttttctgagcgataagcgcgtcaaactcctcctgaggcagcccgttgtcccgcactttcgccagctcgcgcgaaaccacgctcaggttgttgttcaggcgctcgcccggggaatcgatgttgatggcgcactgcgcgcgctgatatagcacccggcagtcaaagccaaggccaatatccttcacgttatttttgctcagactctgctgcacgtgccagaacagcgcttcacgggcgagatcgtcacgccagtagcgctgcagcgccgcggagtcgcggatcggctgccatggcgcatcccacatgatggacagtttgtcctgacgcaccgcgttggtcatgatgctgaccggcacggtaggcagcggcgataaggtcggcaccgctgcgggggtttcccgcttgcccttcagatcgccaaaggtcttattgatttgctcggcaacgctgcggctgtcgacattccccaccacgatcagcgtcatggcgtcgggggtgtaccatttttgataaaagtctttcagctgcgccacgtcgatcggctgcttcagcggcgcggcggggtcatggcccagcatggtggaccctttcaggcgatagcgccaccaaccctctttggtatccagtggccaggtcgccaccatgtcgctgccctgcagcgcatgattgatcgattcaggcgtaatggccagtttaccgctggcgtccgccagccagctcagcgcctctttcaatagatcgttgcggttattgggcaggctgagattaaacatcgtgtaatcgtaggagacgatggccggcggcagaggacgcttcgggtcaatactctgctgccataaagagcgcgcctgcatcgtcggcaggctgccgctttgcgtcaacgccaggcggggaataaagcggctgaaaccgctctgctgagtgctttcgctcagcgagccattattgacggacaaacggacttcgatacggtcgctgggacgttgcggcgtggccaatacctgccacgacaaaccattcgctaaggtcccttgttgccaggccggatcaggctggagcgcttctgcctgcacataaccggccgccgctaccatcagcaaaccgcccgttaagagtttaattgttgtgccctgcatgtgaacccctgatgaacattcctggttacaacagcaccccactgacgggctgccgaaaaaagtgagagtgaaatacgtcggttagaccacacggagacgaaaatgtcgcatgacaacgtaaaataatcatttcgtgtcattcccgccgggcgggaatgacctctaattatgcgcaggaggccgtactccagcaagggagtacgggcctaagaggaggatttaagaggataattcgtgcgttttgttcgccggaacacggttattcagaacgtcatccatctgtttggcatccagttctttcacccatttcgccaccaccaccgtggcaacgccgttacccaccaggttagtcagcgcgcgggcttcggacataaagcggtcgataccgaggatcagcgccaggccagccaccggtaaatgcccgacggccgagatggtcgccgccagcacgatgaagccgctgccggtcacccctgccgcccctttcgaggagagcaacagcaccaccagcagggtgatctgatggaaaatatccatatggctgttggtcgcctgggcgataaagactgcggccatcgtcagatagatagaggtgccatcgaggttgaacgaatagccggtcgggatcaccaggcccaccaccgatttacggcagcccagcttctccatcttgtcgagcattctcggcagcgccgattctgatgaggaggtccccagcacaatcagcagctcttcccggatatagcggataaatttgaagatgctgaagccggtggcccgggcgatgctccccagcaccaccaccacgaacaggatacaagtgatatagaagcagataatcagctgccccagctgcaccagggtgccgacgccatatttaccgatggtaaaggccatggctccgaaggcgccgatcggcgccaggcgcatgatcatattgataatgccgaagataacctgggagaagctttcaatgacgttgaaaatcagctggcccttgctgcccagacggtgcagggcaaaaccaaacaggacggcgaacagcagaacctgcagaatgttgccgctggcgaaggcgccaatgacgctgcccgggatcacatccagtaaaaaggccactaccccttgatctttagcctgctcagcgtacaccgccaccgctttcgcatcgagcgtcgacgggtcgacgttcatcccggcgcccggctgcaccacgttgacgataatcagaccgataatcagcgcgatggtgctgaccacttcgaaatagagcaacgccaccgccccggtacggccaacggctttcatgctttccatcccggcgatccccgtcacgacggtacagaagatcaccggagcaatcaccattttaatcagcttaacgaaggcgtcgccgaagggtttcatttgcgcgcccagttccgggtaaaaatggcccagcagaataccgatcgctatggccgtcagaacctggacatagaggcttttaaagatagaggttttcatagggtgtcctttgggaataaccacagagcaagaagggatatttgacgtctgtggcttaaaaataacaccctggaaacatttcagaaataactaacgccgaaagtgcaacgcaattgttaaaatctttgagctgactcgcacaagtcaacaaaacatttacaaatttgcatcctcccgggccggggagagatagcgcgcgctgaatgcctcctgcggtaaagcgcaaccgaacagatggccctggagcacctcgacgccagcggcttgcaaccagcggcgctgggcgtcgttctccaccccttccgccacgatacgcagcgacaggccgcgcgcgagctggatcatcgccggcaccatgctgacatcctccggcagcatatcgatgaataccttatcaattttcagaatatccaccggcagggccttcatctgctgtagctggtgcaacccggcataacccatgccaaaatcatccagcgcaatctgcaccccggcctcgcgcagcgggcgcaaccgggccatcacatcctgcggatcgtccatccggcagctctccgtcacctcgaggatgagggtacccggggcgatgcggtagcgggcgatcagcttcagcatctcctcgccgcggtcatgctccagcagctggagcagcgaaacattgaccgacagcggcagcataatcccctggctttgccaggccgccagctggcggcaggcctcttccattacccagtagccgaccgggataatcagcccgcaggactcaatgcgctcaatcagcgacggcggtagcgaccagctgccatccgcctgccgctggcgcagcagtacctcggcgccgcagatctcgccgctggcgcaggccacctgcggctgcagccagatcgcgaactgctggttatcgagcgcggtcataatgtcgtgctcttccatcaggcggcgctgagccttttccatctgctcgggatcgaagaactcgatctggtttttgcctttacgtcgtgcggtgacggcggccgacaccgcgcgccggtaaaactgctcggcgctgagcccggcgtggaacatggctatcccgacgctggcgtaggggcgcagctgcagcccatgcagcggtaaacgctcattaataatagtgagcacttgcttacttaacgttaccgcctgccacggttcagcgaggccatcggcgagaatcgcgaagtcatacccgctcacctgagccagcaccatctgcggcgggatcgcggcccgcagcttctccaccagcgtcaggagcagcatttcgcgctgactctccttgaggactccggcggcgtcctgcagggtttcacaggcgacgacgatcagcgcggcgctctgcgggcgggccaccgtctgctccagcatcgccagcaaaaaggctttattcggcagctcggagaccgggaagcgggtcgactggatggacagctcatcatgctggcggaccaggctctgctggttgcggttatagctacgcaccagcataccgatctcgtcgtcatggtgcaggcgcggcagggtcagctgatggccaagacgctcctgctgggagagatcgttcagctcgcgggcgatacgccgcagagggcgaaccatcagccggttgatgcaccaggtgagcgccaccgtcagcatcagcaccagaagtaagtaagcagtcactaacgtagcaagggcgctcatgacgaatttatacatgcgataggagtcggcctgcagcaccagataggccagcggctgcgggttggccggccgctccagcgaataaatgggcagcgaaatctgcaccggcagctcaaacagccgggtgacggttaccggcaccggccgctcggggataaatcgcatccgcagcgcctggaactggttcggcaataccacatccgcccggctgacgatgccagcaggctggatacggcttaaaatggcttccgcttccggaatatcggctttcagaatagccgcagacagcggttcgcgaacggatcgcgcgatactttctaactgcgtggccgtggtaaagcgactctgttgcacaaagtgaaacagcaaaatagtgcaaaaaaccaatacaaaggccatggacacgctcgcgaccatcgccatctgtttgattgtaagtgaacggctgacgcgcaacggtgttctccactgatactgaatacatacccggtatcaatccttcaatcccggtcgtttcaggctgattatatacttaaatccttcgcccacgcccgcgagggatgaagtgacgggatatttccgcgcggtggcgcggacgccgggatacatccccgacggccaacggtgggcaacgcctcacgagtatacgcgaagcgcgtcgcggagtggcgctctgtaacgtaattcagcctattctgctaccagtcggcgtagggcaccagcggctggggcggcatatccagatccccctgccagccggccgccgagtagcggacgtaaagcagcgcatggctcggggtgtaatccttcgcctgctgaatatcgaccgcggcgccgacgaaccagttgctggtcacccgccgctccaccagcgctctggcggtgtaaccgaatccatggctgctgctcccctcctccgtcagctcgctggcgcgctgccggtagtcggacgggatcaggttcagcagcggatagcgggcttgcgtctgggtgcgcgaatgggaccatgacaccgacccgccgagctcccaggaccagttctcggtgcgctgacgccaggtcaccggcacggcgaacgagagatactcctgtgggctgtaatagccgccctggccgagggtgtagccgctgagatctttgtcgtagtgccagatcatattgttgaggccgacggtgacgcgacgattattctcgttgatgaccttgtagtagtacccggtcatccagcgcacgcgccagttatccgccacgtttttaccggtcagcgagtcggcgcccagcgaggaccagatgccgtgagcctccccgcgatcgtagctcaggctcaggccgccgccgtcggcgcggacgccgccccaggtggcgccggtatggctgctgctgtccttctgcccgccaaaggagagcagcgagctggagataggccgccggtggacgttgaccgtgtaccccaccggcccgacgtcgctgctgtagctcagcccccccaccacatcgacgacattgaagcccatcggcgtggtgccgatatccccgctccaggtgtcattcttccagccgaccgccacgctggccccgctgtcggtctgatttttactgccgctggtacaggcgatctccccgcaggtgccccagctgggcgagtagctcccgtcgctgtgggtggaaaaactgccggcatccatattgaccagatcggttcgaaagaacatccggccatccgccagcggagcatccacctgcagcatggtggtatgcgccttcaggtcggaatagccgccggtgccgctggaaccccagaagtcatgttccagggtgacgttcagatcctgctgacgataaaggtcggcggcatcgctgcggatcccgcgcttcagccagtcatcatggctgtcgttgcgcgtcagccgcgtaaaagtatcgttatcctgcggctgcgcgggggtaatgccggaggccaccatcgcttcccggtagtgcgtcagcgcctgctgcggcgccccgctctgggtggcaaagcgcgcggcatcgcgcagcaccagcgcgctctccatcgagggcggctgcgccttcgcctgcggcacaatctgattaaaaatccgttgcgcgtcagcggtatcgccaaggccagctcgcgccagcgccacccgccgctgcatgttcatggattcggtctctgcgcctttcagctgcatgacctgcgcccgggcggccggtttatcgccctcggccaggtagacttccgcaaggccgaggcgcgcatcgccgttgtcggcctcctgacgcagcacccgctgatagtcggcaatcgccgtctggctgtctccgcgctgctgcgcccagtcggccagcgtcagatcatagcgcaccgaggcgggctgccgtttgatgagggcgatcgcctgggcttcgttaccgctgtcgcgcagctggttggcctggcgcagcacccggtcgctttgcaggcgcgcttcgagttcacgaatgttatccgtccacgcgctgcgcggcagagcggcgatttgcgccagagccagatcgtcctggtcgttccccgacaggtagagtcccgaggcgtagacccgttcggcgtcctgcggctggcggttgaccatcgtccgcatcagcgcgtcggcctcctggcgttcgccggcgctgaccagatcccgcgccagacggtaggttatccagacgctgtccggatccagcgccaggcgccgacgctgaacttccgccgcctgcgcccagttgccctggctctccagagcctgcgcctgtttctccagccggtcgttagtcaggctgcgctcaatatcatcgatactccgccgctgagcgggagggaggccggcgatccaggcgctggcttcctccggcgattcggcgcgatagaggttggccaggccgcgcaccgccaggttattgccgcgatccaggcgcaacgcctgctggtaatagcgctccgccgccgccgcctctttgcgcgccgccgcgacgtcccccagccccagcacggcatagctgtcggtgcgatcgacccgctgcgcctgggcataatagttctgcgcctgcgaaagctggccggctttcagggcgttatccccctgctttatcagcagccagtagcggttagtttgcagcaggctgtcccacttgccgcggttcgggctgtcagggtccatggcaatcgctttactgagctgcgccactgcccgcgcgcggtcgccgcgctgggaataggcctggccgagagcgcccaccgcgtcgctgtcgcggctgtcggcctgaacggctttctgcagatccgcgaccgcctgcgtggtattcccggacctgaccgccgccagcccttccgagcgggcgcggaaagtcggatcctgcagctgcgcctgctgttggtcgagcagaacgcgggcgttcgccgccaccgagccggtgggaaactgcagaagaaattgctgcaacgcctgcacgctggccttgctcaccggcatgcttttcacctcactgaaccacatatcggcggcgataccgcgtcccgaggccgatcgggccatctccgccagataggcgaacccctcctgcggtttgttatcggcgaacatctgcttcgccagcgaagtcagcaggctgacgttgcccggcgcgctggcgttcagttttttcaactggctgacgccttcgctatggcgggacggcaggcgcgccaccagcgtccagtattcaatggcgacgtcaacgtcatccggcaccccgccgtacagtttttcataggcggcgatggcttcatcgaccttcccggccacgcccagcagtcgcgcctgctgcagcgcctggcggccctcgccggtgttgcttttcatctcattgcgcgacgccttcagctccggggagtccggcgccagcttcgtcagtcgttccagctctttttgcgccccggcggcatccccctgacgcagcagatagcgcatccgcgcggcaatcagctccgggttgttgggatcaatcagctccagacggtacagcgactggcgcaccaggtcttcacgattgctggcctcgccgaggcggacctgctccagcagatgctcctgggcaggcgtcgtcgccgcctgcgctaacggcagcagcgcaacgccgagggacagcgtgagtaaacttagtgagagcttgcgcattcctggttccagtcaggttgtaattcaccactcgccgtgaaacgaaaacggtgttgatcccaaccctggccgaacagcgtcagaactgcgctgtagtaggcatccgcgccgggatagttatcggcgacgcgctggcgttgcaccgaccgggcctcgtcgtcctgtaaaaacggcagcattgccgcggagaagcccactggcccctgaccgctggttttgccggtggcgatattcactttctccgggggtaccccctgcttcgtggtctgcgccgccatcggcgtgaagcgttgcagcagacgcgctttctgcttatcgccatcatggagcatgcccacccacaggtagacgcgaatcgcgtcatagctgccgatcggcggcttttcggttttcagctgccagcctttccctttctcatagcgcacccagtccggggtaaagcctttcggcgcggtctccagcagcaggcgcaggttactatcgcgcagagcgggccacggcgcgccaaaacgcacaaagtaggtggccagctgcggcggaagatagctggggttaaaccgccagccgctgtcatcggcaaaaccgacttttcccggcagcagcatcgtgccgaggcccggcaccgccaccgtctcttcagcgacaatccgcgccagcagggcttttccggtctcggtgtactgcggctgttgccacaggcgccccgcctccagcagcgcccaggctatccacagatccgagtcggacgccgagttgctgtccagcagggtccactgctcatcgtcctttttgccccacagccagcccggcaaatgttgtttcagatcgccttccgccaggttgttctgcgtccaggtcagcagtttgtcgaaccccgcgcgatcgttggccgccagggcgaaaaacaggccatagctctgcccttcggaggtggagattttgcgcgcatcgctggggtcaatcacccgtccctcggggctgacgtacgcttgtttaaactgctcccaggcgggccactggcaggcggcgcccacctggcccgccgccagcagcagcgccgagagcaccgcgccacaaagtactttcatcatggtttactcatcatccaggctaagacggcggcggctgatgatgcgcagcatgcgccacagcacccatgccagcagcacaatgctgatggcggcgaagatcgccagcagtatcgggtggttagagagcgcgaaccagatgcgctcgaaccagggcagatgacccacgtagtaaatatcccccacccgcagactgttgacgccggattcgcggatcaccgccaccgagccaaacatcgctgcccgcttaccgctgtcgttgagggcgttggtcagcagttcattaccgcgcgggctgtcggccagcagggccaccacgctgcgctgatcgttatacggcgactggaagccaatcaccgtcgccatcggcccggaagaggtaatgtcggtgcgggtattgggcgtgcgggcctcatcgtcgggataaatgctcgccaggtcatagtggcgcatcggcattttcacccagcttttggtcgcctcgaccagcaggttgattttggtgtcgtccttgagcgacgacgggatcgcgccgatcagcagcagatccgcgtctttattcttgatctggttgccatcgtcggtcatctgcagattaatcgccgccagaccggtctgcgagccgatgccccccagcgcctgcagcagcgtcgccacctggccctgggtcggcgccttcggcaccaccaccagcgtgtcggaaaggtccgccatacggctgtaagggaagcccgcattggcgaagacgcgcaggtccggcaaggcgataaagtgataatacttcgagaagtcgatggtcgaatcgtcgccaatcaccacatggttctgcaccggctggaaggtaatacagttgtcgatggagccgccgggcatcgggttcatatactggaagtcaaagcgcagctggttgaccgccccaagacgcagcgcggggatggtgacctccgatttgccgtccagcagcccctgcagcaccggcaggcgcaggatcagtttgttcacgtcctgggagctgttaaggctgaacgactgcaggaactggtcgttgaggctgatatccatccgcgagctgtccttcaccggcggcatggtgtagcggtatttcagatccatatcgatgccgttggcccgcagcagatagagatccggcggcaggttaagcgccacggtgatggcatccggcaccaggccgctggactgcagctgttgctcataggttttcagctcagcgaaggtgaccgagcggtcggtgcgcacccagttcggcgcgtcgtaaggctgacgcggctgcagggttttgatgccgtccacggtgacgctgctgccgcggaacagaatattgccctgagcaatccccttcgccgccagcagcaggtcgttatcatcgcggccgaaaatcaccagcagcttgacgtagggatcgttcgggttgtcgatcatttcgatggtcggcgccttgaccggcggatgatcgcgcaggaagtccggacgcttgtcgttggtggcgaagacaatggcgttacgatccggcagttcattgaaatagaccgggaactgctggccgcgccagccggccttgctgccgaaccaggaggcgactatcgccgccgcctgctgctgggtgaccgctggcgagcccgggaaaatcatcggcagcttcagcggacggttatcgcgcggatcgtagaacggcaccgggaagtgtgacagatcgttatttaccttcagcgactggtaggtgagatccagatagctttcgcgtccgacgtccagccacagcgtactgctggccgggttttcgcagacgtcgcggtagtggccgacaaactccagccgtacgcggttgaagtcggtgatgtacagcgggtcaatcggcagctgcgcgcggatctttttccccagctgctctttagtgacgggcaggacgcccatcagctcatcgttaagatagaccttcaactgcgactgcacgggcagcagcgagggcgatggggtgtattccagattgagcagcgcgttggcgaccagctcatcgctgcgcatgccgaattcgaccgacgcgtcaggccgtgagccgcgcagcacgatgctgccgggcggcggcgcgatggtggcaaagctcagcttcacctcccgctgcggcacgttctcggccaccgccgccggagcggtcggttcggcgagggtcgccgtcggctcgcccaccacgatcggcgcagccggggtcgcggcctgcggctgaacgccaggggcagcattcgccaccgcggccggcgccgcataagaggccagtggataccagctgcacatgcccaccgctactgcacacatccaggaaagttttcttttcatcgcattatcatcattgttgagccattgccgggtctgcggagagcgtcggcgcggcgcgttcagggcgtcggggtacaaacgacgctatccaggccaccagcgaagtgagcgcgcggaaaaccaccttcaccgacggcggcgaaaactccgccaggtgacgatagccacgaaagcccagcttgaggatatccagcaggctttccatcggcttatcttccgggaagctatcctgccaaagcgcccacgtatcagcgcgggcaaacgtacactgcacaaaatcgatatgctgctggttggttaacggcagcagctggagccccacttcgctgccgttgacccgcgcgaccctgaccgggaaggcatactcctgctgtccccgtttgagcagcagcctggcgttctggccttccagcacctgcgcgtcgccgttaattttgatccccagtccgccgtcggaatagtcgtggacggtgcaggagaacaggtgaccatcttcgcgggcgatagccgccggcatgctcatttcgacacggtgcgaacggcgaacctgcttgctttcaaccgagaccgccaccgcgccgccaagaataatcaggttgtagaatacccagacaatactcacccagacggtgaggatttcattttccgggccgtacatgaagcgccagatccccaccgcgacgccgaccagattgagcagcaccaggtagatatagggccgggagatcacccagtcgacatactcctcttccaccagcccgcccttcgcggtgacgttgaacttgcctttatgcgggttgatcagcgccacaaaagtgggcggcgcgatataccaggccagcaccgtctcgtaaatttcactccagaacgaatggcgatatttgccctgaatcttcgagttggtcaggctggcgtggatcatgtgcggcaacacgaatagcgcgatcatcagcgctggcgcataaatgatataggcatggagcagcaaaaaggccagcggcgccgtgagaaagatgaggcgcggaataccggagagaaagtgaagcatggcgttggcgtagcagacgcgctgcaccagcttcaggcctttgccaaacagcggattatcgaggcggaatatctgcaccatcccgcgcgcccagcggatgcgctggccgatatgcgcggataaactctccgtcgccagccccgccgcctgcggaatacgcatataggcggaggtatatccccgccggtgcagacgcagcgaggtgtgggcatcttcggtcaccgtttcgacggctatcccgccaatttcgtccagcgggccgcggcggataacggcgcaggagccgcagaagaaggtggcgtcccacatgtcgttcccgtcctgcaccaggccgtagaatagcgtcccttcgttcggcgttttgcgaaaacgaccaaggttgcgctcaaagggatcgggcgagaagaagtggtgcggggtctgcatcatcgccagctctttctctttcaggaaccagcccatggtcatctgcagaaacgagcgcgtcggcacatggtcgcagtcaaagatcgagacgaactcacctttggcatatttcagcgcattattgatgttgccggccttggcgtgttcgtggctggtgcgggcgatatagtgcaccccaacatctttggcaaactggcgaaacgcttcccgtccgccgtcgtcgaggatccagatgttcagcttgtccttcggccagtcgatgccctgcgaggcgtaaatggtgtttttcaccacgttgagatcttcgttataggtggggacgaagatgtccacggttggccacaaatccatgtcctccggcagcgacaccggctggcgattcagcggccagaccacctggaagtagcccagcaccagcaccacccaggcgtaggtctctgcgaacagcagaatgatcccgcacaccaggcttaccgggtcgttccagttcagcgtcgaggtatagcgccaccagatatagcggcacgacaccgtcagcgacagcacgatcagcatcagcgccgagaaacggcccgggatgcgtcgcaccagcagcgccacgccccacagcagcatcaggaagataaactgcgacagcgggttaaagggctgcgtaatacacatcagcgccagcaccagcgagcagaaggtcacccccccaaggatcgcccggcgcagtttaggattgaggtgcgccagctctttctgtttatccagatggccggtgcgggcgttcatctgctcaggcaatttttccagccactgcgtatagcgaccgtgcaccccttccagcgccgccagcgaacgccagttgacctttttctccggctccggcacgcgcgtcgtcagtaaccacagggattgcagcaggtagcgcagcggatccagcggacgcgggcgatgcggatttatgtggggaaaataggtttcatggcgggccagaatcgcctgccagcgcggcgtctccagcggcatcagcgcccagaccagcgatgcccacagacagccaagcgacgccgacagccacgaagcgccgtgctgccgatagtcatcatagcgcgcacgcagccgctcccccaccggcggggccagcagcagcgtactgaggcggatcatgccgctctcccggcggaatagtggatcaggcaccagttcgccagggtcagcacctcttccgccgccagcgaatcctgacgatactccccaagaggttgtttcgccgccaggcactcggccatcgcctcgtcgcggtgaatcgtcaccggcaggatgcgcggctggctctccagccacagctggtagagatcttcctgcagctggctgccgacccgcagatcgttaatcagaatatcgccgttggccgggaggggctgctggtgtagacggatatggctattggcgtcgggatgaaccaccaccagcgagcgatcgcaaagcgtcagcagctcgcgggtcaacggcgaataacccgccggcagatccagcagcagccagcggtactggccctgtagctgctgtactgcctccgctatcgcccccagggtgggctgcagctggtcgacattttctctttcgccggcgctgagctggccaaacggcagtagatcgatatgctgcgtatagcgcaagcccgcgtcacgccagtcccggccgtcgagcagcgcccgcgcccagccgtcctgatgatggatatcggtattaaagaaaaagcgcagcatattatccgggctggcgtcgatcgccagcacgctttcaccgagcaattgcagggcccaggcgagtgcagccgtaatggacgtgacgccagttcccccgcgcacgccctgtaatcccagaatagccatctccggcttccttattttttctctgcaaactctgccagcagcggccagcgcttcagcgccgcgttcagctgttcgcgcctggaaatatcatgataatcaatatccggcagggaaaatgcccggctaagcgccagaaaatcattttgaaaggtgtaccccagcgtggcgtccgtgggtaccgcaggatcttttgctggcatatctctgtccgttcgaaatttattattaaaccagaggacgtatacagctcatccttaaaagcaggtgtacatgctaaaactgatgacctttaatttcaatgttaggtttactctgtcggtttcgctagtaaacttattcagtgtcaatcagggcgcacgagggatgccgtggataatgtatttactttgggtatttcatcattatgggatgaagtgtgccatatgccggtcggcggagtatggtggctcaacgtcgaccgttatgccgatgccgtcagcctgtttaatcagacgctggccgcgcaggcgaaaaacagccacgttgccgcgctggttatgggaaacaaacccaaggatatcatttcattagatcatattcacggtccggataatatcgcgctgttcaccctgccgaatcgcccccaggcgctggaggaaatacaccgcgatttagtctgctccctcgaacctggcaattatttgtttattctgctatgcgctgaaaatgcctggcaaaatataaataatgaaaagttatgcgcctgggtagaaaagaccagccgctgggcgcaatatcaccgttgcgcgttcttagcgatcaattccgcgcaggatatcgatcggcagctgactcccttattacgtgagtaccgctccctttccggactggcaagtattcgttaccagggcgaccggcatatctttgatattgcctggtggggaagcgataagggtatcagcgcccaacagcagctgatggtgcaacatgatgacgccggctggcgattagcgcaggacgctgaaaccagcgtgcagccgcgcagcgacgaaaaagcgatcctcagccatgtgcgcgtgctggaaggcgccccgccgctgtcggaatactggacgctgtttgacaccaacgacgaggtcttcaacgccgggcgcaccgcgcaagcggcgacgatcctcttctccattacccaaaatacgcaaattgaacagctgggccgctatattcataccctgcgtcgccagcgcggtacggcgctgaaaatcatcgtccgtgaacaaaccccgagcctgcgcgcgaccgatgagcggctactgctcagcagcggcgccagcctggtgatccccagcagcgcatcgctctcccgctgcctgacgctaatcgaaagcgtacagaaccaaaagttctcccgccatatcccggaagattttgccaccctgctgacctggagccagccgttaaagctgcgcggctaccagaagtgggatgccttctgcgaagcggtgcacaacgtgatgaccaataccctgcttccacccgacagcaaaggcgtgatggtggccctgcgcccggcgccggggctgcgcgttgagcaggcgctgacgttatgcaaacctaaccggatgggcgacatcatgaccatcggcaataaccggctggtgctgtttttgtcgttttgccggatcaatgacctcgataccgcgctaaaccacattttcccgctgccgaccggcgatattttttctaaccgtatggtgtggtttgaagacaagcaaatcctctcggaaatcgtaatcatgcgcggcgtcgagccggcgcgctggaacacgccgctgcctctctcggtcggtaaaaacgagaccattaacgccacccacgatggacgccactggcgacgctaccccgaaccacaccggttaaccacccgcgaggagcaagcctgatgatgtctctcgccgatattctgcaactggtggtgctctgcgccctgctgttttttccgctgggctacctgacgcgccactatcagcgccggatccgcacgacgttaagactgatgttctttaaaccccgttacgtgaaaccggcaggggtattacgccggggaacaacggttaagcaaggcaaagcgaacaaatgacaaataaaaaaacgaccgcggcaccgcttccgctctggcagtactggcgcggccttggcggctggaacttctactttctggtcaagtttgccctgctgtgggccgggtatctcaatttccatccgatgctgaacctggtatttctcgcctttctgctggtgccgatcccgcgcgaaaagctacaccgtatccgccactggatcgctattccgctgggattcgcgctgttctggcacgatacctggctgcccgggccagagtcgatttttagccaggggtcgcaaatcgccggcttcagcgccagctatatctgggatctgattgtccgctttatcaactggagcatggttggcgccttctttgttttactggtgctatggttgtttatcagccagtggctgcgcgtcaccgtgtttgtctcggcaatgatcgtctggctggcggtcagcccgctgctgccggcctttaccctatggcccgccggtcagcccaccacggccgccgccacgaccgcacaggccaataccggggccaacgccgccgctggcgccgcgtccagccccgccaacagcgatattccgccgcagaccgagccgccgacctcagccaacctgaccaactggctgaacgctttctatgccgccgagcagaagcgcaagacgccgttcccggaccagctgccggcggatgcgcagccgtttgacctgctggtgatcaacatctgctccctctcctggtcggatattgaagccgccggtctgatggatcatccgctatggaagcactttgatattgtcttcaaaaactttaactccgcgacctcctacagcggcccggcggcggtgcgcctgctgcgcgccagctgcggccagctgtcgcatactaacctgtatcagccgtccggcgccgactgctacctgtttgaaaacctggcgaagctcggcttcaaccagcagctgatgctcggccataacggtctgttcggcgacttcctgaaagagctgcgttcgctgggcggcatgcagagcccgctgatggaccagaccggtctgccggtcagcctgcaggcgtttgacggctccccggtgtatgaggatctggcggtcctcaaccgctggctgaagaccgaagaggccagcagcaatccgcggaacgccaccttctataacaccctgccgctgcatgacggcaaccacttcccgggacaaagcaaaaccgcagactacaaagtgcgggcgcagaagctgtttgatgacctggataacttcttcaccgagctggagaaatcggggcggaaagtgatggtggtggtggtgccggaacacggcggcgcgctgaagggcgataagatgcaggtatctggcctgcgcgatattccaagcccgtcgatcactaacgtcccgacggcggtgaaattcttcggcatgaaggcgccgcatgaaggggcgccgattatcatcgatcagcccagcagttatctggcggtgtcggagctggtggtgcgcgccctcgacggcaaaatgttcagcgaggacagcgtcaactggcagcagtatgtcgccaacctgccgcagagcgcggcggtgtccgagaacgccaacgccatcgtcatccagtatcagggcaagccttatgtccagctgaatggcggtagctgggtgccttatccgcaataagcgacaaggccgcctatgttggcggccttacatcgtgagacgttcccattccaccttctcagcccgcaggcatacgggcggggaaggcggcaaatcaatcaccgtatttagcgctgatcctgtttcgccagccagaccaacagcttgaggctggcagagtaataatcatccttgtcgtcaatctgcggcgcctcctgcggttcacccagcgtcagatcgcgcaccgccagcaggccgccggccatataccagggggccacctcgttggtgctgacgttgatccacgccggggtttgcaggcgcgggtaactctgcatccaggccttccagggcgcgagcaaggcgctgtgcggatcggcccacgagagatacagcgggatacggatcgcatcgaaactcatccgcggcggccactctttggctggcagcatcttgccatccgcccgcagcgccacccagtcgctgggtagatgtgatttcccccagcccatctgccccagcagcgcctgtccgtcgctctgcaatgtccgccaggcggtgagatgcgtccgctccgcgaaggcgcgccaggccgggaagatgaaataggaagggttaaggttcaggtgatcattgaggttgaaccctttcacgcccgggagcatcacctggcgaccggcgaaagtcaccaccgtagacttcagcagggcggcggtgatggcgtcagaggcaatcgcatagcgcttatcctgccactgcttttgcgcgcgcagcagcgcccaggcgatcagggtatcgccatcggaggcgttgtttttatcggcgatagggtccggcgccaccgggttatagcgccagtaaaacaacccgttagacttgttgcgcagggtgttgtccgtccactgccacagcttgtcgaacgccggacgatcgttattcgccaccgccaggagcatggcgaagccctgaccttccgtatgcgacacattgccattggcggtatcaatgatacgaccatccggcatcataaaacgggccttatagcgctcccaggccgtatccgcccacgccctgggcaccagcatcactaccgttgtcactatcaccgccactaaagcacgcaggggcataaattcactctttatggatggtagtagagaaactgaacgtcagagacggagaacacccgctcacgctgcagtatcacgtgggcactgcctccctgactctgcagccagcgagaatataacccctcgagtatggcacagaacgcgttgcaccagcgcacgcgccccgcttcgtcgcggctgaccggcaacgcctgatggcgcaggcgcaggccgtcctcaccgacatcgatggtcaccacgccccagtgaaaatgagtcagcagccggttgatattggcctccagatcccccaccgtctccgacgccggcagcggatgggtctccgccagcgaggcgcccatctgacgcaggaagggctggctttccagctcgccggcattatttagcataccttcgatcataataatcaacagatcgaaccatccggcaggcgtctgctgctgctgaaaccaggtcatcaccaccgggttattgttctccgtcatcatcaatgatctcctaacatatagcgaatatagagcccggcggtgctttcgttataatccccgaaggtgtcatagccaatctggccccccagggtcatttgtttgttgaccttgtaatccgccccggcgcgcagggtataccctatgccgctcttcgaggtcgcggagtagtaggcttccttggcaaacccattgctcaccgccgtctccagggtctgttgccactccgaattggtcgggaaataggcgctcttatcctgactgtaagactgatagcccaccgagccgccgagcttcatggtccagttatcatatttctccgtcagactgaccggcagcgatacgctgacgtagttttgcggactaaagtagcccccctgaccataggtgaagtagctgaggtttttggagtaatccatatagctcatgctcaacccggcctgcagctggcggtattcgtcatggtagggacgaagatagaccccggcattggcgttgatactggtgttgctggcgacgttctgccccagatagctgtatccaccgccgccgacatagaagcccgcgtcgccgtcgtcatagctcagctgcagggtgccgccgtttttcgtcacctgcccccaggttttcccggaataggcgtctttcagacccacgtaggaaagcaggctgtcggttagcgagcggcgttcgccggtgaggatcagcgacagatagttggtcagcttgggcgaccatttcaccccgccgactacggtattaagatcctggcccaacggcgtgctgccgatatcgacccggtaatcgtcaccgcttaacgccagcgccagttcgacgccgttggccttctgcgaatcggtcgagccgctggtctggtcaacgttcggcttgcggctggacgaagagagatagctggccacctgccccgcatcatagctcccgagcttcgccaggttttccatcccgctgctggtggtcggattgaaatctgccgcgttcagggtgccgaggccgcttaacgcctcggcccctggattgctggcgaaataggccgtccgctccgcctcggtcatcgaggcgatcgccgcctgctcgctggtggcggtactcaccatgttggagaccgcgttagccagcgggttggcgccgtagcgacgccaggcgtcgccgctggcggtcccggcgttcaacgacaccggggtgacggtaaagtcaaagcgcgagtcgccaaacggcgaggatgaccaggtcagcggcgtccggagctccgtcagcttgctggtgcccgattcgccgtcgcgtccacgcacgtccattcccccctgcagccagctgccggttttctcctgcagcgactccatcatggtgtccacctgacgcagcatccgcgtctgggcggtgtccaccggcagatcggtgcgctggatccccggcagcgtggaaccgggcgcggcggccgactgggcaacctgccacggcatgtactgcccgtaggcggaggccgtccgcgtcggcgccgacgtttgcgacacgccgataaaggggttatccgccgccagcaccccgccgacggtcggcgtttcgctactgttggtgctttgcatgcccagcagtttgccgcgggcgctgcgcagataggtcatcgcctgctgatgatgtccctgggcctccgccactctcgccagcagcagcaggcgatccggggagttatcctggcgcaaaccgccggccagctgttcagcgcgatcgttgttccccgccgacagcgccacgtcgatggccccggcgcgcgcatcctggttcggcgtatcgcgcgtcatcaggtagtcatagaccaccccggcctctttgttcattttgccgctctggtacagccgcgccatggcgaacatcagatcggtattttgcggatcgctttgcatagcgcggatcagcttgtcatacgccgcggcgtaattgccctgctcgcgcaggcggtcggcttcgttgatcacatagccattgcgaatgctcgccagctgcgtcggcgtactgctggcctgcagctgcggattgctgatcaggttctgcgcctcgccggtcagcccggcctgattcaggacggcgatctgatcggcgtaatccccggcattgccggatacgccgctgctgatattgttgcgcaccagcgagaccgcggtggtcaggtcgccgctctcggccagcagacgcgccagcttgccggcgtccgccggggcttttggcggcgtggaggccatcgcccgcagggtattgctggcggcgatggtattgccctgcgccaggtagttttcggccgtcaccaactgcaggttgtagttcacccgctggcgcaaatcgcgcatgtcgctggtctggctgccgccgggaatgcgcgccagcagcgtctgcgcctgctgccaggcgccgttttcgctggcaaacagggcggcggcatacagcgcactgttgctggcgccggggcgataggccgccgacatcagcgaagaggcctcgctgccgttacccgatttttgcagcagccgggccaggtcgaggcgcagccagggatcgtccggatagcgggcgacgccttcgcgcagggtggcaatggcgccggctgggttaccgctgctgacctgcgcctgggcctgacggcgcagggcatcgcccggcataccggccaccacccgcggctgcagtttttgccgcaggctctgcgggagcgtctgcagcatcgcctgcgcctcggcggatttattctgctcgcgcagcacgtaatagaggttttcccgcgccgccgcgttctgcggatcgtcatttaacagtgagcgcagcgtttgctccgcctggggcaaatctttgttgtgccgcagcacatcggcgcggaacagcttcgccgaggcgccctgcgccccgctctgctgcgccaacggcgcggagagcgccagcgcctggctgatattgccctgcttataggcctgctgggcctgcgccagctggccgtagaacagcgcatcggccgcctgctgacgacgggtcgccgaggcgtcgccgccgaggtccgcggcccggctcaaatactgcgacgcggcctggtagtcgccactgcgctgcgcgatatagcccatgcccgccagcgcatcggcatcctgggggttggtctgcaatacctcttcaaactgctgcttcgcggcggcggtattgccgctgttgagattggcgtagccctggccgcgcgcctgaccgctgcgccgttcgcgaaagtaattctgaacttcgctgtcctggggatgccgctgcatccaggtgtcgtaatactgctcatccccggcctgcgggcccagccagagcagcgcctggcgcaagccgctgtccgcctctttattgccgctggccatcggctcgagcagggcgatcccttcccggcgagtctcttcccgccaggttaatgctttgcccaacgccacccgcggggcgttctcctgcggatgctgcgccacgtactggcgcagctcgctgatagcctgcggatagagcgatttgtcgctggccatggtcaggtaatattctgccgccagcccggcaggcggcgtattgccattgaacatgctgcgccaggtcgccagcgccccggggatattgcctccgcgcgcctgctggcgggccaggctgagctggccctgcggcacctgcgacatctttttggcgttgtccagatcctgtagtcccgggctgtcaggggccgctttcgccagccgcgcgcgccactgcgccgccgcctgcatatcgccgccctgctgcgaccagagcgccatcagatacagcgcctgggtgttgttggcatccaccgagagcaccttctgcagggactccatcgccagctcgtcatgagatttctcatgccagtagttggcctgagcgaacaacgcctgtagcgccgcatcgttccccgccgccagcgcgccgcccgaggcagcgagagtcaacgcgccggtgaggcagaacgtggtgagccgacgggtgtttttcatcgttattattatttttcttttcattggttatccccgaacccagacgcttacgggcgtgacgtttaaacatcgcggtcagcgccagtcccattatcgaggtggcaatcagccccagcaccgccaggaaacctgagtgctggctggcataccagaccgccatcatgtaccacggcatctgaccgctggggaacggcgtactcacctggaagctgcgcaccccgttatcgctggtgatcaccgcggtatcgccgcggatcccggcgttaatgcgcggcgattccagatcggtcttcagtcgcgccagctggtcatcattgctggccagcgccaccaccaccaggcgggtggaattccacggcgagcgatagctgatgaacccgcgccaggcgctgctcgacgaaaagtagcgatcggcgtcgaggctggcggaagtccagtcgccggtgagccggcgctggactttttgccacaagtctggctcgcggacgctcagcacattatctaccgggcggtagggtgagtcggccagcaggctctggttaaaggcctgctgatcgagagcggtgaccgccagcacgtcacgttcacgcagcgactgcaaatccccccgccggtgggcatcccgagcacgacgcggttattcgccagcgcggtgccggtcgcgttcccggagcgtgccgccagattcagcagggtcgccacctgggtttcagacgggtccgccggcagcagaagggtcgtctgcgaatagtccgccagccgcgagaaggggaacgaggcgccgacaaagtaggagagattgggcaacagcgagaagtgacgcgtcttgctcaaatcgatccaggagtcgtcagtgatccggctcttgatattgttattcagcagcaccgaacacggaacatcgtcctttggcaccacattgaagtacatcgacagctggttatcgccgtaaatcaggtagggcgccagcgggatggtaaagcgctcctggcgcgcatcgcctccgaggtagcgccagactttctccagcggcccctgcttgttcatcggcaggttgttgaggaaggtgccgttgagcgtgacgctcagcaaggacttgtcctcattaatccagctttccgacgggaagcggtagccaacctgtagcggaatggtttccccatcccacagatagagatcgggcgcggcgcggaaggcgatacgtaaaggttcgtgccagacgccgctgacggtcgggctttgatccttacgcagcagctcgctgagcttgaccggacgatcggtggggatccagcgcggggcatcatatgctttgccaaccgggatggtctgcggttcgacatccagcgtcgcggtttgcggcgcaaagttgccgcgggttaaccgccaggcggccatgcgcagcgccgtatcgtttttaccgacaatcagcagcagtttataggccggattggcggggttggcgatgatgcgcagcagcggcttatcggtttccggcagcatcatgccgcccacctgctcccccggatggccaatcacgatgccgtggcgttccggcagacggtcgcgcagagcgctgaaggcaatgccgcgatagtccgcctggatacccagccaggaggagatcagcgccgcggcgctgaagacgtccgccgacggcttgtccccataggcgaccgcaatgtccgccggggtcatctgcatgctgtcaaagaagggccgcgggaagtggctcaggtcgtcgctgatgttcagctgctggctttcccagctgaaatgcgacgtgggcagcaccgtcacccgcgacgtatcatgaatgtcacgctggcactgcagggtatcgccatcgttgatcttcacgctcaggttattgctggagaccatcagcgcgggcggaatatccagctgataatgggagacatcctcgccatcggcgcccagcggcagcgtgccgagcggttgaccgttgagcatcagctgcagggtggcgttgcggctcgccatctccggcgatacgcgaacggcaaggctgagctgagaatggatcaccacctgatcggcaggcagggtaaagctgaccccaccctgtcgctggccgccgctgaggataatcccgtccggcatccccatctgcgccagattcagatcgcctccccagaccggagcgacaggaatgacctccggcgcggccgtgccgctcaccggcgggggtaagtccggcataaccggcgcaggggccgtcgccgccgcatcgccggcggtggcgggggctgccggagaggcgccctcctccagcgaggcagccggaggttcgtcgcctggctcgctgtccgccgcgtcgttgagctgcgggaagctcagcggggcagcggagccggagcccggttcttcactgtgtagcgcaggcgcagagagcatccctgccagcagcgccagcgtggttaatcgcttcataacgtcccatcctcctgcgccgttttcgccactgttgcccgattgcgctggctgcgacgggttttccacgtcagccagaacagttcgaacacgcagcgtaaaatggtgaagaaggagcggaacgggttatcctgcgggcgcggcggattaatccacgcatccgcgcgggccagcaccacgcgcaccagttcacggcggcgcgaaagcggaatatcttcatcaaacttgaggcgcaggaagcgctcgtcagaggtgaccagctgggccggaatcgagatagccccggactgcaggatcagctcaatctcttcgatgtcatcctccagatggcgattatcaggcgcgaccacgcggcagccgcccatcgacaggtccgcggtatggctgcgcgagacgatgccgctggcgtaatggatcaccaccggaatatcgacatcgatacgaatggtttttcgcacctgccgcgtttcgcgcgccacggcaatcgccgccagcaggaagatcagactgtagatcccccacccgacgttgagggcgataacgttgggatccgagccaaagtagtcatggccaatcgcccggacgatgccgaccaccaccccagggccagcaggcaggccaccaccaggtgcgggcgcaccacggtgaaatcgaagtagccgacgtcaagcagcccccccttatcggtaacgttgaacttgccgcgtttggggaaaatcatcgtcaccagagtcggcagcaccaggtggaaggccagcacaatatcgtagatctccccccagaagctgtagcgatagcggccgttcattcgcgaaccgacgtaaatagcgaggaacaggtgcggcagggcataggagacgatcaggctcgccgacgagtaaataatattgaggttaaacagcaggtaagccagcggggcagtgacaaacaccaccctgggcagcgcgaactggtagtagagcatggcgctgagatagcacaagcgctgctgaaaagtcagcccgcggccaaacagcggattatcgacgcggaaaatctgcgtcatcccgcgcgcccagcgggtacgctggatgacgtgcaccaccaggcgttcagtagcgagacctgcggccagtgggatatcgagaaaggccgacttccaccccagacgctgaaacttcagtgccgtatgagcatcttcggtcaccgtttcgacggcgaaaccgccgatctgcgccagcgcctcgcgacggatcaccgcgcaggagccgcagaaaaaggtggcgttccagttgtcgttcccctgctgaatcgggccatagaacaacatcccttcgttgggaatgttgcgtccgacggagaggttacgttcaaacgggtccggggaatagaagtagtgcggcgtctgcaccagagccagcatcgggtctttcaggaaaccgccgacggtggcctgcaggaagacgcgcgtggcgacgtggtcgcagtcgaaaacgcagataagctccccctgagtcagggtcagcgcatggttaaggttccccgctttggcgtgcttgttgtcattgcgggtgatatagcccacgccgacgtcggcggcgaagacggcaaactcgctgcgcttaccgtcatccagaagatagattttcattttatcttttggataatcaatgcattgtgccgccaggacggtatcgcgcaccacctccagcggttcgttatagctcggaatatagatatcgaccgtcggccacttactcatatcatccggcagcggaacaatgccgcgcttcagcggccagaccgtctgcagatagttaagcagtagcatcacccagatatagacttccgccagaaagagtcccatgccgagaatagcttcaatggacgagttgaagtgcagggtctgcgtgaggcgaaaatacatgtaacgggtggacatcagcagcgacgtgacgaccataatgaccgatacgctgcggcgcttgctgaagcccatcagaaagagaataccgatacttaacagaccaaaaatatactgcttttggctgtccatcggcgtgatcaccaccagcacggcgacgggtgacagcaccagcgccagcaaccaaaaaagagattttttcattcagcagccctgcaaaaagttaacgccctgacatgcgtggctggctgtgcaccgtgccatcgccaatatgaatacccaacagcgaagatatttttttagccatgatttcaatatcgaaggccgctgccgaggaagcgttaaagtccaggatcgacttctgcgaggcattggcctccaccacgctttcatcacgatggatcacgccaagcagtcgctcgcccagtttctcttccatcaggctggtgacgtcccggctgacctggcgacggctatcgctttggttaatgacgaaatagtgcccgtgcttatgattcagcgccgcgccggtcaggcgctgcttttctacgtgcgccagggtcgacatcgaggcggtatccgccagcagcgggataagatgcaggtccgccagccccgtcagcgcctttagcgcgggcgaaggtccagggggcatatcggcgatggtgataagcccgggataattaagcagcgcggacagaccgcgctggaggaaatggtcattatgggtcagttgctcatcaaacgcctgacgctgcgcctcgctcacttcgccatatggcaggacgaaaatattactgccggcgctcaacacgcactggctccagtcgtgcagctccagcgccttcgccacatagccccgctcatcgttcagcggtacgccaaaatgcaaacgcagcgcgttctggacatcaaaatccagcgccagaactttgctgcccgtccgcgccagcgaataggctaaattggccgccagggtcgttttccctacgccgcctttcggtgaacagacgcaaatcaacggcatgtcgcgatcctttccagaagtgatttcaaaggctggtctttatttttcgccaccggctccgcgcttttcgcggcgaacaggtgggcatagttctcggcggcgggcgcgggtcggggggccattctcggcggcggcgccatggccggttccgacgccggaattgaaggcgcaggggtcggcgcaggctcctgcctgaccggctccggtgcggctgcggcggtctccactaccggctgggaagtagcaggcgcggccgaagcggcagacacaacaggatcagaggttggcgccgctgctacggccgcctctacctggcggaacagatccgcgggcaccgactgcggcaacggcgcggagaccgagcctcccagcgccagagaagagggtttctcggcgccgggatttagctgattgaggatcgcccagtcgccgtgttcccgcgtggcggcttgcgaagaaagatcctgaaagttgaggttttgcgtccgcgttttttcttgaaagcgctgcagatcatcataatggttcattgataacctcatgattttaaaaatttcatattaagtttgttgttattttctgggtatattaaaaatatcgtgacgcttctgggatggcagataacgcgccgatggtgacgtaccaatacacacgattgacagggttataatagtttagaatttgattttcgggatgattccacggcagaagtatcgctacactaacatttcccttgcagaagggtagccccattttttaggtatgcgtacatccttaacttcccgcaatcaccacgcttcccagtcgtttttatataaaagtattaggtcatgatgaaatcatagcgtcagatcagcgaaagaataaacctgaaccattttaatttctctttaattctataaaaatggactgaaaggcttattttttcggataatctacgaagaatgctctgagagcgtgacataaactgcggcaatatgcgtaagcgccaggttttatccacggcgggagagaagctcccggccatgggaccgggagcgcgccatcaggcgtgggacttttgcggattctcatcctggtcgacggcaaagcaggccaccagctggccgccgtaatccttcagctgcggctggagctgagtgcaggggccaaagcgacggcgacagcgcgcgttaaaggcgcagcccggtggcggatttagcgggctcggcagttcgccggtcagcttgatccgctcgcgccggtcgtctgggttcagacgcggcgtcgccgacagcagcgcctgggtgtacggatgacgcggattgttgaagatctggtctttggtgcccttctccacgcagcggccgagatacatcaccatcacttcatcggcgatgtgctcgacgaccgacaggtcgtgggagataaacacgtaggacagccctaaatcctgctgcagatccatcatcaggttcagcacctgggcgcgtaccgaaacgtccagcgcggagaccggctcatcggcaatcaccacatctggatccagcattagcccgcgagcaatagcgatacgctgacgctgaccgccggagaacatatgcgggtagcgatcgtaatgctcggttttcaggcccactttcgccatcatcgccagcgctttttcacgccgctgctctttgctcaggctgctgttaatcagcagcggctcctccagaatctgccccacttttttacgcgggttcagcgaaccataagggttctggaacacaatctggattttttgccgccgcagcttctgcgcctgcgggtcgtgcttaagcagatcctgcccctgataatagagctcgccgccggtggggatctcaatcatcgtcagcagacgaccgagggtcgatttgccgcagcccgactcccccactaccgccagcgttttaccgcgctcaagggtaaaggagacgccgtccagcgccttcaccagccgttccggggcgaataaccccttcttcaccggatagtgttttttcagatcaatggcctgcaacagcggttgtggcgtggcggccttttgcgtactcataatccaggcctcccggcatcatcgagtgggtagtgacatttagactggcggccgccggtcagatccgcgagcgccggctcttcgctacggcatttatccgtggcataggggcagcgcggattaagcaggcagccgttgggacggtcatatttccccggcaccacgcccggcagcgaggccagacgcgctttatcctgggcgaattccggcagcgcgcgcagcagcgcctgggtataaggatggcgcggcgcgcggaagatatctttcgcgtcaccggtctccaccacctgacccgcgtacataacgataattttatgcgcggcttccgccaccagcgccaggtcgtgggtgatcagcaccagcgccatattctcctgctgctgcagatccagcaggagctcaatgatttgcgcctgaatggtcacgtccagcgcggtggtcggttcatcggcaatcagtagttttggccgacaggcaatcgccatcgcgatcatcacgcgctggctcatgccgccggaaagctgatgcggatagacgtccagccgcgaggccggatcgggaatgcccaccaggttcagcaggtcgatggcccgctggcggcgggtttgcttattaccgccctgatggaccttaatcgcttccataatctggtagccgacggtgaagcacgggttgaggctggtcattggatcctggaagatcatcgccacttccgcccccaccagctggcgccgctctttttcagagatgcgctgcagatcgcggccgttaaattccagtttgtccgccatcacccggccgggatagtcaatcagccccataatcgccagcgagctgacggatttaccggagccggactccccgacgataccgaccacttcaccctgcttcacgctatagctgatgcggtctacggcgcggaacggcgcgttttcatcgccgaaatgcaccgataatttatctacattcaataacgccatctcgaacctcttactgcttcagtttgggatcgagcgcgtcacgcagaccgtcacccatcaggttaaatgccagcaccgtcagcaggatcgccacgcccgggaaggtgactacccaccaggcgctctgcgcgaactgcaacacgtcggaaagcatggtgccccactccggcgtcggcggctgcgcgcccatgccgaggaaccccagcgctgccatgtcgagaatggcgttggaaaagcccagcgacgcctgaacgatcagcggcgcgagacagttaggcagaatattaacgaacatctggcgcatcgcgccggcgcccgctacgcgggaggcggtcacgtagtcacggttgacctccaccagcaccgcggcgcgcgtgagacgcacatagtgcgggagcgccacgaaggttagcgccagcgaggcgttgacgatggagggcccgaagattgccaccagcaccagcgccagcagcagactcggcagcgccagcataatatcgacgacgcgcatgatgattgagtccaccactccgccgaaatagcccgccaccaggccgagcaccacgccgaggatcagcgacagaaccaccaccaggcagcccaccagcagcgacagtcgggcgccgtacatcaggcgcgacagaatatcgcggcccacgtcgtcggtgccgagcagatgcgccatgctgccgccgtcctgccagaacggcggcgccagcagcgaatcacggaactgatccgccgggttatagggggcgaggaagttggcgaataccgcgatgacgatcatcaccaccacgtataccagcccgacgactgcccctttgttgcgtttgaaatagtgccagaactcctgcagcggagtcatgggtaccggcgcagcgataactttattttcagtaacttgtgacatgatggccccttacttcttatgccggatacgcgggttcaccacgccgtacagcaggtcgaccagcaggttgacgaggataatcatcgtcgccaccagcagcaccccgccctgtaccaccggataatcgcgacgctgcagcgcgtcgatcagccagcgacctaaaccaggccatgagaaaatggtttccgtcaggatggcgcccgccagcagggtgcccacctgcagaccaatcaccgtgaccaccggcagcatcgcgttacgcagcgcgtggatcacgatcacccgcatccgggtcaggcctttggcgcgcgcggtacggatatagtcttcgccaagcacttccagcatcgacgaacgggtcatacgcacgatcaccgccagcgggatggtgccaagcacgatagcgggcaggatcatatgcattaaggcgtcaataaagtcgccctgctcgccccagatggcggtgtcgatcagcataaagccggtcagcggcagggtatcgtcaaggaacaccgtatcgctgatacgcccggagaccggcgtcaggtttagctgcaccgaaaccagcataatcagcatcatgccccaccagaagataggcattgagtagccggtcagcgccaggcccaccgcggtgtggtcaaagatggagccgcgttttaccgcagccagcacgcccaccggaatgccgacggcgacggcgaagatcatcgcgcagacgcccagctcaagggtggctttaaagcgtgggacaaactcctgccacacgggaatgcggcttttcagcgagatgcctaaatcgccgtgcagcacgccccagatatagtgggcatattgctgccacagcggcttatcaaggcccatttcggccagcagctgcgcgtgacgttcgggggaaataccacgttcgcccgccataatcatcaccggatcgccggggatcatatggacgaaggcaaaggtgagaagggtgataccgataaatgtcgggatgactagtcccagacgtcggagaataaactgcaacataacccggattctctctagtgacgccccgcctggcgacagggcgtctgtattgctcacaaaagcattccccggaatagcgggaatacgccccccgcctctcccacgcggggagagggggtcaggcatcgtgcttattattcgacagagacgttatcgaagtggtgtttgcccagcgggtccaccacatagcctttgacttctttacgcaccggctcatagacggtggagtgagcaatgatcagcgccggagcctggtcatgcatcactacctgagcctgtttgtacagttcaatacgcttgttgtggtcgtcggtagcgcgggccggctgaataagatcttcaaacggcttatagcaccagcgcgagtagttggagccgtctttcgccgcggcgcagctgaacagggtcgcgaagaagttatccggatccccgttgtcgccggtccagcccatcatcacgctctggtgctcgcccgctttcgcccgcttcagatactcgccccactcgtaggtgacgatcttggcctggacgccaatcttggcccagtcagcctgaatcatctccgccatgcggcgggcgttcgggttgtacggacgctgtaccggcatcgcccacagatcgatggtgaagcctttttccaggcccgcttctttcagcagctgcttcgccttctccggatcgtaggtgtagtccttaacgtcgtcgttatagccccacatggtcggcgggatcaggttcttcgccgcctggcctgcgccctggtaaaccgctttgatgatcgcttctttgttgaccgcgtaggtcagcgcctgacgtactttcacgtcgtccagcggtttcttctcggtgttaaaggagagataaccaacgttcagacccggctgttccagcagggtaatgttcttatcttccttcatgcgcgcgatgtccgccgggttcgggtacggcatcacctggcactcgtttttctgcagcttggcatagcgcacggaagcgtccggggtgatggagaagaccagacgatcgatcttcggcttggtaccccagtagcccgggaaggctttatacagaatgcgggaatctttctggtattgcagcagctggaatgggccggtaccgataggattgagatccactttttccggcgtgccggctttcagcatgttgtcagcatactctttcgaaagaatggaggcgaagtccatggccagatcagcgaggaacggcgcttccggacgggtcaggacgaactggacggtattatcgtccactttcttcacttcgctaatcaggtccggtaagcccatcccttcaaagtattcatagctgccgccagaaactttatggtacgggttattagtattcttctggcgatcgaaggagaacaccacgtcatcggcgttcaggtcacgggttggtttaaagtctttattatcctgccacttcacaccctgacggaggtggaaagtataggttttgccatccgcactgacttcccatttctcagcaagtcctggaataacttccgtcgtaccggttttaaattcgaccaggcggttatagatcggtacggagctggcatcataggtggtgccagaggtgaagagctgtgggttaaatccttccggcgagccttcagaacaataaaccagggttttcgcttgcacgctggcggcgacggtcatggcgaccaggctcagaccaagcttcagcatccctgatttcttcaaggaaatactcattattctgctccaaaattgtgatgttgtttgcatatatccgccggacctttatttattttttacccggtccggtcggtggtgcccgaaggcgtagagagagatggggattcctttcgcaaaaacgactgagttgcagtacggattctccatgaaatgcccctcatgccctacaatctgtcaacagaatggggaaacgtcaatacagccagccgggttttacatccagcgtgagaaacggcaggcaaagattaaaaaaacttcaggacgctattttcagcagagaaatttatgctactggcaattcagcagaataaagaccttattaatttgcaacacccagtgggaaacaatgccagcaaatgagaaaaatttcttgctgtgtgaccaatatgtgagcgattaatagcgtgaacgttaaaacgcacagcggaaaatgctgcattcagccataagcttcgcgaaaaaagatctgttcatcgataaaaaaatgcaatggaagatgtcacaaaatagcgaatagccggctgaaaacctgagtaaagacgtttattgtgattttggtggtatttttggccagtcgtgcactgatgatgcccggcggcgctgcgcttgcgcgggcctacgaaacgcgagtcgaacctcctgccaccggaggttctcatcctcgcaggctccagatgcaaaaaagcctgctcattgagcaggcttttcgaatttggtcggtgatagaggattcgaacctccgaccccttcgtcccgaacgaagtgcgctaccaggctgcgccaatcaccgaatgcggggcgcatcttactgctgggatgcctacccgtcaatgccttattttcaaaaaatcgctcaaccggcgagaaactcagcagcctgagcagcgaatcgccggttgctcaacgtttttagcggcagttgacctcaaacgttttgcgatactcggataccttacatgtcaccggctcgccgagataggttgcgcccgccggggtgaatgtaaactctcccagtagcatcgtcagctcccccagctccgggcaggattgctgatgacgcataatatccgggcgggtatcgttattcaccgcccgggcgatgtcgctgtatgccagcttgtcggcaaaggcattagcacaaaactgcagttcgctttgcgccatatgcgcggcctgccccttcagctcggcatgctgtgccagcagcagctggcgaacctcgccggcccggctgtagccaatcgccgtatagccggccttattgctgaggttgacgctggcgccagccgcaagcagcgcctcgacattggctttattattcattttgaccgccagcatcagcgggctgagatcgttggcggaaagctggtccacctttgcgccgcgctgcgccagcgccgcgatcaccgcaggcgccccctgccccgccgccacctgcagcgccgtgagtccttcacggttcggcttatccacttccaccccggaggccgacagcgccagcaccagatcgggatcatcccccgccgccgccagcatcagcggtgtggtgccggatttatccgccaggctggtgtccgccccggcgttggccaacgtcgtgatggtttccgccgatcgcgcgtgatcgacagcgaggaaaaaggccgattccccggacgcgttgacggccttcacgtccgcgccgtgcttgaggagcagcgccacgatctcgtcgacgttcttcttaaacgcgccgggcgccagttgtaacgccatgtcttcggtcatcagcgcgcgattgcccgtcgccagcgatttcgccgccgttgcgccaactatcttgtccagcgtactctcctcttcgacaggcgcatcgggctttttcatcgccagaatatgctgatagtcgtttctgacgtccccgccgtcggagatggcggacatcaatgccgtactcttgtcgatggaggtctgattcaccgacgctcccgcctggagaagatcgccgataatcgcggtatcgctgccacgcgccgccgccagcatcagcgccgtgacgccctggcgcgtctggaggttcggcttcgcccgacgcttaagcagcaattccaccacatcgcgacgattttccgcagcagcgaccatcaggccgcttaagccggttttatcctgaccatccacatcaatgccgttatccagcatggctgcgatcgtcgctggcgcatcgtatttacaggccagcaggaactggctggtctcttcctcagactggcagcccgcgagcatcatcaggcacagtaggaccaacccctttatcaccttcatcctttctctccatgaaaagttcatgcacaggggaagcgaggaaacaggggtaatcaaagaagaagaggtcacctgccagacacgtccactgtgcgaaaaaaatccctcgcgcggcgtcagccggcgagggattagcttatcctgggctcaggaaaggaaaacagacccgagaatctgaaaactatcgggccttactttttccaccggcaccagttgttgttctcattgatcccgccatccggcgaggtatagccgaggcagcccataatggtgtcgtacagctcgacgtgacggcgcggcaccttcatcgcagcctgctgctgcagatgggcaaacgcggcggcgtgatcgggattttccaggtacttatccgacatccacaccatcatcggcacgcggaactgctccggcggcgccatcttgcgcggcgtaccgtgcaggtgttcacgctcgttaatcgactccccgtggtcggcggcatagaacacaatcgctttcttatcccgcagctggtcgaggacgctgacgataaagtgatcgacataggtcacgctattgtcgtaggaattgatcagttccgctttcgagcacttgttgtcgacgccgacgcactccggtttccactgggcgaagctgcgcgggtagcgttgggtgtagttaaagtgggagcctttggtgtggagaatgatcagatgcttaccggaggcgttgccctgcgccataccgcgcttcatctcatccaccagcagcatatcgtcaacgctcttaccgcggttgcgcggctcggcgccaatctgctcgcggtaggcgatattgttggccatcgtgttgctgtagaaccacatctcgctctgcatggcgtacagattgccgctgaagcccagctgatgcagcacggcaaagacattctgctctttgagcgtccgctgtgggttatcttccgccccgccctcgcgcacaaacatgcagcgtaacgacagtttggtagcggtatcgcacgagtaaccgcggaaggcgacgagattcttctctttctccagctctggcgtggtattgcggctatagccgaggatgcccatatggtcccagcgggtcgtttcgccaatgataaacaccacgtaggtatcatccagaccttccggcgcgacgtaggtgaacttcttcgccgggttaatcagcgatttgttgtctgaggattcatccacctgcgcccaggcgtacagtcccagcgccgacaaccagttcgacggcaggtaagagttggcgatcaccccgccatagctcggcatatccacttccgaatggcgctccacatcatgctggcgcagctctagcaggcggatgggtccccagacaattagtccggccagcaccacgatcagcacgtttttaacccgctggcccggggtacgcagctggcgcagcagcgtatggcggcagcggttgctccagatgaacagcaacggcggcgcgctcaccgccaccagccagaggatcaggtgccagccgatgacctctttcgacaggtcgatatcggtggtcatcaccgaagcgataatcccgtagccaatcaccacattgaggaacgtcatgtagtaactcgccgcggcggaaaacaggacaatcagcgtcgccagaatgcgccagatacggcggccgaacagcgacagaagacgtaacaggaagaaggtgacaaataccgtggcaaccagttcaacaacaccggaaagccctttccagaaagtgaactcttgagcataaccatcgaaacgccggaaaaaaacggcgacgttcataaaccagccgatgtacagcgccagccaaaaactaagcttctgctgcgtcatcgttctaatatatttcatgcaagcaaacctggaaaaagaagaataaaacaccgcctgacgctgtggcacgagtcagtaggctaatagggtgcgttagggttggttatcagaaacctctacaaaccgcgataagtagaccacagggaacgagaaaagtatcaggagggaatgtgatccagccaaacatttacaaaacatttggctggattggcactatttgcttagggaaataaccaggggcacgtttcacgctgcaggtttcaggcgtgcgcctcgttatataccgtgcttttcggctgacgaatggtggtggataacgccagcgagaggatcagcagggcgaagatcacgcagaaggtcacgtagaaaccgccgaacagcgaagcgatgagagagccgcagatgctgccgataccgaagcccagataaatcacgccatagtttttcgccagattgttcagaccaaagaactcactcaccagcgacgggaagacggtaatggtgccgccgaagttaaaggcgacgcaggcgatggcggcgaagaaggtcaaggcattcagcggggcgaacagcagcgcggccatccccaccagcgacacgacctgaccgatggtaatcacgcgaatgcgggagattttatcagacaggatacctaacaccaggcgaccgctgaggttcgcaatcgagataaccgttaccgcgttggccgccgtggcgacatccaggtggaccattccctgggcaatatccttcgctacgccaattacgtacagaccgctcatgcaggccgtcaggaacatcaccgccagcatccagtactgcggtttacgcatcgattcggcgagggtgaagtcgttttccacgacgccgttggccgcggtggctgccgagtgatttggcgcatctttcatcagggtcgcgccaaagacgatcatcaccagcacgatagcgccccagataacgaaggttttttccaggccaacggtggccagcaggtgggaatcaatgaatttgaaccccaggctgccgagaccataggagccaatggagaaggcggagatcagccctttacgttccgggaaccatttcacgcagttcgacagggtcagcaggtaaccggcgccgtccgccagccccaccagcacacccgcgctcagccacagcatcatcaggctgctggagtgcgcggtcaggaagaagcccaggccgagcaggatcccggaggccatggtgacgcgcttcacgccaaagcgctcctgcagcttgccggcgaccgacgaagagagcgccagcccgaggctcagcagaccaaaggaaaaagccacctgactgaccggctcgcccagtttgtcagacagcgaactgttaaacaggctccaggtataaaccgaaccgagagcgaattgggtgatgatggtgccgatcagtgtcagccagcgggtcgattgacggtttgcagcgttcatagcagttgtcctgataaattaactgccgccacaatagcgaaggcccctcatccagtgggggaaaaaggcatgaactgccatcagcggggaatgaaatgcattaatgttggaatgaatggcattgcataacattcattccgtaaattacaggcaaaaagttagtgtgcgctatctcacagaaatgcgccattgctgagatttaacaataaccacatcgtttcaaatgcgtaacaattcccgattaaaaattggcgctgacccccatcaaatagagcgtattttcccctgacggcaggttatccgcctgcgacagcgttgcccatgccgccacgtgggatcccaaccgcatatcagcgcccagggtgacatcgctccagcctccctccctggcacgggtcatcggcgcccagacatcgctggcgagcgactggttatagctcacctgcgcccagggatgcacgccccacagcgcctgataatccatgcgccagccgagcgtgttaacgtagcccgcctcgcctgcgcttctcaccgtcggcgcggtgacgtcgctgcgcaggctggccaccggcccggaggttacgccgtttgccagcggataattccagccaacgctcaggccgcggccgctttccggcggcgccagcccctggtttaacgccagcccgccgggcgtctcagaggacttcatccgctcggcgagaatatcttcataacgtggttggtgatcgctatcccatgtatagcgttccgacgtattactttttgtatcgatagcgatatattcctgttgccaggcattcgctccagagacacatgacacccagacggatacgctcgccgggatcaagaacccccggaggccattgcatttctttattatcattaatgcgactccagaaaagagccgaatcggcaatattgctgtgtttttagtggggatacgatttccctgtattaactattatctttatctttcagccgtcaaggcgggcgtccacttttttagcgcagagggagaaacagctatgcagcgttgcggatgggtgagtcaggatccgttatacatcgagtatcacgataccgaatggggtgtggcgcaaaaagagggtcgccagctgtttgaaatgatctgccttgagggccagcaggccggtttatcgtggatcacggtgttaaaaaaacggcagaactaccgccaggcttttcaccagttcgatccggtgcgcgtggcggcgatgggtgatgacgatatcgagcgactcctgcaggataccggcatcattcgccatcggggaaaaatccaggccattatcggcaacgcccgcgcctatctggcgatggaagaaaatggcgagtcgttcactgattttgtctggtccttcgtcgacaatgcgccacaggtgacccgcgctgcgacgctggcggaaattcccgccacgacgccggcctccgatgcgctgtcgaaggcattgaaaaaacgcggctttaagtttgtcggctcgacaatctgttattcctttatgcaggcctgtgggctggtcaacgaccatgtcaccggctgcttctgtcaccctggaggtcaggatgatccgcaagtgggacactaaagataccgcgccgctgctggcgctgtggctggacagcacgattcatgcccatccttttatcagcgaaagctactggcgcgacagcgtcgcggtagtacgggatgtctatcttcccgccgccagcacttgggtctgggagcaggatggcgagttaaaaggctttgtcagcgtgctggactcccgtttcgtcggcgcgctgtttgtcgcgccgggcgccacccgccagggcattggccgggcgctgctggatgaagtcaaacagcactacgcctggctgagccttgaggtttatcagaagaacgaatcggcggtcagtttctaccatgcgcagggcttccggattgaagactgcgcatggcaggacgatactcagcacccgacgtggattatgcgttggccggcggatcaaatgccgtaagcggcagcgccgggccggtatatttctccagccacgccagggcggtgttcccggcacagccgttgcccagccgggatgtcggaatatctttggttaagacgttcaccgccccgtttttgcagatgccgacctgcggatccaggtcgggccacgctccttcatgcaggcaaatcacccccgggcggatcccctccgtcaccacggcgccggccagcacctgaccgcgggcgttccatacccgcaccagatcgccatcgacaatcccgcgcgcctgcgcatcctgcggatgaatagtcaccggttcgcgcccggcgacggcatagcgctcgcgcagcgcggtgtggttcagttgactgtgcagacggtgggccggatgggccgacagcagctgcagctgccccgcctctgcgttgccatgccactcgtcgggctccagccacatcggatgcggcggacagtcggcgtaaccaaaagcggcgatggtcggcgagtggatctctattttaccgctcgccgttttcagcgggttggcctggggatcggcgcggaaggcggcgaaacgcgcaaaacgggcattctccggctcctccggcatctcaatcagctggttagcctgccagaattcggcaaatggcggcagcgtcacctgctgctgggcgccgcgccgggcggccatctgatagaaagtctccagccactgcaaatcactcttcccttcggtgaagcgttcgcggccacccgcctcccagcgttcgctgaggtcggcaaagaccgcgaaatcgtcacgcgcttcatctcgcggggcaaccacctgcttcatcggcaccagatgctggttactgtagtccccggtcatggtcagatcgttgcgctcaaacgaggtggtcgccggcaggacgatatcggcatggcgcgcggcggcggtccagaagcattcggaaataacgataagctccggtttctgccacgcctgaatcagtcggttggtgtcctgatgatgagtaaagttggcgccgccggcccaccagataaagcgaatatcgggaaagcgccgcgccatgccgttgtgctgatactccgcccccggattctccagcgcctcgacaattcgtgcgaccgggatcttctccaccgcgtccacgcctccggccacgctcccctgcatcgagcccagcaccgccgcgcggcgggtcgggttgccgccgttggcaaaatggtaggaaagaccaaatccgccaccgggggtgccgatctgtcccagcatggcggccagagtgaccagcatccagtgtttctgctcgccatactgctgacgctgcatgccccagccggccatcagcatagtggtattttcgtggaaaagttgcgccagttcgcggattttatctgctttaacgccgcagatcgctgctgcccactcagcggttttcgctacgccgtcgctttcgccggtcagatagcgggcaaaaatatcgtagccgctggtgcagcgggtaagaaacgcatcatcctgccagtcattttccaccagcgtatgggcgatccccagcatcagcgcgacgtcggtgcccatatgcggcgcgatccactccatcgaatcgccaaagaaatcgacggtttccgatcgcatcggatcgatgcagatcagccgcttaacgctctggcgcagccgatcaaaccaccggatcccttgctcgtcggaggcattccaggcaattttcagcgtgttcagcgggttggcgctccacagcaccaccacttcgctgtgctcgagcaccaacggccaactggtctgctgctgatacacctcattgccgccaacgacgtaaggcatgatcgcctgcgccgcgccggtggagtaatcgccaagatggccggtatagccgcccgccaggctcatatagcgctgcagcagcgtcgccgccttatgcaatacgccgttagagcgccagccgtaggagccggcaaaaatggaggccggaccgtagctgtcgcggatccgccgatgctgggcatcgatcagatccagcgcctgctcccagctcacccgcacgaattcatcctgaccgcggaccccctggggcttgtccggtgaagcaaggaagcctttacgcaccattggatagcgcacgcgggttttgctgtgcacctgatcgcgcactgccgtttgcagcgagttggcaaacggtgtcgccagcgcgccgcgggaagagaggacgttttccccgtccgtttccaccagcatcggtccccagtgggcggcggttaagatggttttggttgcagatgaggttggcaagggcggctcctggtcagcgaatgcaggtgtcatgacggcgtgatgggcaaccgttcaatgttatttacaaaaagagatggtatccggggaattttctccgtaatcgcgcgtcataatcaaccgtcacgttcgctgtgacaaagaataaaaaggattaaggacattaaatgaaaaaacgcgtacttatgattgcggcgctggtcagcggcactctggccatttctggctgcaccaccaacccctataccggtgaacgtgaagcaggcaaatccggtattggcgcaggtattggctccttagtgggcgctggcgtcggcgcgctctcctcttccaaacatgaccgcggcaaaggcgcgctgattggcgcagcggccggcgcggcgctcggcggcggcattggttactacatggacgtgcaggaagcgaagctgcgcgacaaaatgcagggaaccggggtcagcgtgacgcgaaatggcgacaatatcgtgctgaacatgccgaataacgtcaccttcgacagcaatagcgccaacctgaagccggccggcgccaacaccctgaccggcgtggccatggtgctgaaagagtatgagaaaaccgccgttaacgtggtcggctacaccgacagcaccggcagcaaggatctgaatatgcgtctgtcgcaacagcgtgcggacagcgtcgccagcgcgctcatcacccagggcgtggcggccaatcgcattcgcaccaccggcatgggcccggcaaacccgatcgccagcaacagcacggcggaaggcaaagcgcagaaccgtcgcgtggaaatcaccctcagcccgctgcagtaagcgcaacctcatgtcgcccggcagccgttctgccgggcaaaatgcttgatatcgctatttttcgcgctaaggtgttggcagattttcagcaaaggaagccaccatggcgaaagcggcgcgtgcaactatcagcgatgtggcgaaagccgcaaagaccggcaaaaccagcatttcacgttatcttaacggcgagaagcatctgctttccgacgacctgttatcacgtattgaaaaagccattgccgaactcgactaccgccccagcctgatggcccgcggcctcaagcacggccgaacccgcctcatcggcctgatcatcgccgatatcaccaatccctactcggtcaacgtcatgagcggcattgaagcagcctgccgggaaaagggcttcaccctgctggtgtgtaataccaataacgagctcgatcaggagctgcactacctggacctgctgcgcagctaccaggtggaaggcatcgtggtcaacgcagtcggtatgcgggaggatggcctgaaccgcctgcagcagtcggccctgccgatggtgctgattgaccgtaaaatccccgacttcgcctgcgatgtggtcgggcttgataacgcccaggccgccaccaccgccaccgaacatctggtggaaaaaggattcgaggccatcctgtttctcagcgaaccgctgggctcggtgaatacccgtcgcgagcgcctgagcgcctttcgcgccacgcttgcccgccaccacggcgtggtggccgaaaacgccgaggtgcagcttaacgacggcgcgatgctggacaacgtcctgcgtcagttccatgcccgccaccgcgggatgcgcaaagcggtcatctccgccaacggcgcgctgacgctgcaggtagcccgcgccctaaagcgcgtcggcctgatctgggggagcgatatcggcctgctgggcttcgacgaactggagtgggcggagctggccggcgtcggtattaccaccctcaaacagccgacgtggcagatcggctacgcggcggtcgaacaggttattcggcgcattgccggcactaacgaccccatccgcgaacgggtattttccggcgagcttatcgtccgcggatcaacctcccgttaacgatccttcgtgatgccgatcataaattaaacatctcgccctttcttatggaaccgataccatctagcgtattaaggagattaagcaacaaacgccgggagtaagagcgcgatggccagaaaaattattgtcgttaccgctgcgtatggtaatgaccatgttaaatccttaggcgggcaggccgccgtcctgccgtttatcgccaacgccggcgcggacggcgtcgaaatccgccgcgagctgtgcagcgcggaagaactcaacgctctgccctcgctggcggccaccattgagcgccacggcctgctggcctgctactccgcgccgcaggcgctgttcaccgacaacggcgagcttaacccggatctcccgacgctgctcgcggaagcgcaaaccctgaacgctctgtggctgaagctctcccttggccatttcctccacaatcagcagttggatgagctgcgcgatatcctcagcgacagcggcatggcgttggtggtagagaatgaccagaccgactgcggccagctggcgccgatgcagcgcttcaaagccgcctgccgggtccatcagctgccgatcaccttaacgtttgatatgggcaactggctgtgggttggcgattcgccggaagaggcggcacgtcatcttgcgccggcagtcagctatattcatgttaaagcggcggagcctcatcatgagaaattccgcgctgtaccgccggatcaggccgccgaacgctggctggccctgctcgataatcttcccgccgacgcgccgcgtggaatcgagtttccgctgactggccatgacctgacggccgtgacccgccgctacgtcaacctgttacgcgaggattaagtcgtggaaaatttagatgtcatcaccatcggcgaagctatggccatgtttgtcgccaccgaaaccggggatctggccgaggtggagcatttcatgaaacgtgtcgccggcgccgagctgaacgtcgccaccggcctggcgcgcctgggtctgaaagtcggctgggtgagccgcgtcggcaacgacagctttggccgcttcgtactgcaatcgctggcgaaagaggggatcgatagccacgctgtggccatcgacaaccgcttcgctaccggtttccagatgaaatcgaaagtcgaaaatggaaccgatcccattgtggagtatttccgcaaaggatccgcagccagccatctttcgccggacgattttcgcgccgactacttcaccagcgcccgccatctgcacctaagcggcgtcgcggcggccctttctgagagctcttacgcgttgctggagcatgcggcgaaggtaatgaaagccgaaggaaaaaccctctctttcgaccccaatctgcgcccggtactgtggaaaagcgaagccgagatggtggagaaactcaaccgtctcgccttccaggctgactgggttttgccaggcttgaaagagggcgtgattcttaccggccagcagaccccggaagggattgccgatttctatctctcccgcggcgtcaaggcggtagtcattaaaaccggctgcgacggcgcctggttcaagagcgccagcggcgaacagggaacggtcgatgccattaaagtcgataacgtcgtcgataccgtcggcgccggcgacggctttgccgtcggggtgattagcgccctgctggaaggcaaaaccctgcttcaggcggtgaaccgcggcaataaaatcggttcgctggcgattcaggtccagggcgacagcgaggggctgcccactcgcgacgcgctgggcgagtaacttttctacgcaacgataacagccgtcctgtaccctacctgcagcgcggcacagcagcgtccgtttcgacggacgtatgtctcctcattgacagaggcaagcctatgaatagctcaacaaatgcaacgaaacgctggtggtacatcatgcctatcgtgtttatcacgtatagcctggcgtacctcgaccgcgccaacttcagcttcgcttccgcggcaggcattaccgaagacttgggcatcaccaaggggatctcctccctgctgggggcgctgttcttcctcggctacttcttcttccagatccccggcgctatctatgcggagcgccgcagcgttcgcaaactgatctttatctgcctgatcctgtggggcggttgcgcctccctgaccggtattgtgcataatatcccggcgctggcggcgatccgctttatcctcggcgtcgtcgaagccgcggtgatgccggcgatgcttatctatatcagcaactggttcaccaaatcagagcgctctcgcgccaacaccttcctgatcctcggtaacccggtgacggtcctgtggatgtcggtagtctccggctacctgattcaggccttcggctggcgggaaatgttcatcatcgaaggggtgccggcggtgatctgggccttctgctggtgggtgctggtgaaagataagccgtcgcaggtgtcctggctggcgcagagtgaaaaagcggcgctgcaggaacaactggatcgtgaacagcaaggcatcaaagcggtgcgtaactatggcgaagccttccgctcccgcaacgtgatcctgctctgcgcgcagtattttgcctggagtatcggcgtatacggctttgtactgtggctgccgtcgattatccgcagcggcggtgaaaatatggggatggtggaagtgggctggctctcttctgtcccgtacctggcggccaccatcgccatgatcgtcgtctcctgggcctcggataaactgcaaaaccgtaagctgttcgtctggccgctgctgctgattggcggactggccttcatcggctcctgggcggtcggcgccaaccacttctgggtctcctacaccctgctggtggtggccggggcggcaatgtatgcgccttacggccccttcttcgccattattccggaaatgctgccgcgcaacgtcgccgggggcgccatggcgctgatcaacagcatgggcgccctgggctccttctgcggctcgtggtttgtcggctacctgaacggcgccaccggcagccccgcagcgtcctatatttttatgggggtagcgcttttcgcctcagtatggctgactttgattgttaagcctgctaataatcaaaaccttccacttggcgctcatcacgcctgaacgactcatactacggagattcgcatgaagccgtctgtcattctctataaaacgcttcccgacgacctgctacagcgtctggaggagcacttttccgtcacacaggtgaaaaacctgcggccggagaccgtttcgcagcacgctgaggccttcgcccaggctgaaggcctgctgggctccagcgaaaaggttgacgccgcgctgctggagaagatgccgaagctgcgtgcgacctccaccgtttccgttggctatgacaacttcgacgtcgaggcgctgaacgcccgccgggtgctgctgatgcataccccgaccgtgctgaccgagaccgtcgccgatacggtcatggcgctggtgctgagtaccgcgcgtcgggtagtggaagtggcggagcgcgtcaaagcgggtgaatggacgaagagcattggtccggactggttcggcacggatgttcaccataaaaccttaggcatcgtcggcatgggccgcatcggtatggcgctggcgcagcgcgcccacttcgggttcggcatgccgatcctgtataacgcgcgtcgccagcatccgcaggcggaagaacgcttcaatgcccgctattgcgatctcgataccctgctgcaggaggctgactttgtctgcctgatcctgcccctgagcgaagagactcaccatctgttcggtcaggcgcagtttgccaaaatgaaatcttccgccatcttcattaacgccgggcgtggcccggtagtggacgagcaggcgctgatcgccgccctgcagaacggtgagatccacgctgccggtctcgatgtgttcgaacacgaaccgctggccaaggactcaccgctgctgagcctgccgaacgtcgtcgcgctgccgcatatcggctccgccacccatgagacgcgctacaatatggcggcctgtgcggtggacaacctgatcgacgccctgaacggcaacgtagagaaaaactgcgtcaatccgcaggtaaaataagccataaaaaaacccgggtaacggcggcaaccgccctccccgggttctttttgcatcctgtccatcatcctgcccgttcgccgcagccaacgtcagccagatgaagcattaacgggtggcgttcaccgccgccgtccatgcctgattaaacgcctgatgctgcgccgccagcggcccaatcagcgcattgtactggctggcctgctgggaggttgggaactgaatgccgttggcgacaaagctcacctgcgtcccctgctgagcgacaaaatccccaacctgaaccagctgctgggtaaagatctgcgcggccgggatcagcggctgcagcgcgtcggctggcgccgtcaccaccttggcgtaaacctgatcgaagaccggcttgagatcgtcagcctgcttcagcgcgccatgcgcggcatcggcctgcattttcgcattctgcagctgctggcttagcacgcccagcgcgccgttcgcctgacgcagcggctcacgctgggtcatataatcctgcgggacgcggatcgcattgacgctgtccactaccgggcgcagaccagcgtccatcgcctggctcacctgctgcgagtaaccgtagatcaccgcgtagtcagagacaaaaggcccaaactgttttttctgatcggcggtcagcgtcggcagacgttcaccgctacgcatcgccgtattctgcaggaagtcgataaacgctttgcgctgatcgccctctttatcaaaacacccactcaggctaaccaccatcaataaggccgccatagccgcaaaccagcgagagcaggactttcctgtcgccatttttttactcctttcagccaaaaaaagcgcacaacggcacacacgtgccagacgctgacaaggatagtccagctcggcctcgcaggataccctttcctgctaatcttacgcgggaaaaacaccattttgcacgccatcgtcgcgctgtagaacgtctgttatgcgcatcacaaatatggtcttaagaacaggtgggccagaatctcataagccattgatattaatataaataaaaagccacaacccggcactgcgccttaaagcggacgataatcgcacgctttggcacgcgtctggattgcctgcctcgcatttcaatgatttgatgaatgagcgattaacggcgacatgttcgattatcgcacaaatcaaactcaacgacgcgaaggcgacgataataataaacctctgtccctcgctcagtctgccaggaaagccgtatgactaagacaaccatcgacattcaggcctttatcaacgagcaccccttcacccgctaccagtggatgattcttgcgctctgctttatcaccgtcgcgatggacgggttcgataccgcaattatcgggttcatcgcctccgacctggtgcaagagtggggcgtggaaaaatcggccctcggcccggtgatgagcgccgcgctggtgggcctggcggtcggcgccttaaccgcagggccgctggctgaccgcatcggccgcaaaaaagtgctgatcatgtcgatcgtggtgttcggcggattcagcctgctcaccgccttcgccaccagccttaatcagctgacgctgctgcgcttcctgaccggtctgggccttggcgcggcgatgccgaatgccgcgacgctaatgagtgaatatgcgccggagcgccgtcgggcgctgctggtgaacctgatgtttgtcggctttccgatgggatcttcgctgggcggctttttatccgcctggatgatcccgcactatggctggcagagcgtgctggtgctgggcggcgtgatgcccctcctgctggcggtggcattaatattcctgctgccagagtccgtccgctatctggtagtgaagcagcacccggcgcagcgcattgctgctattctgcgccatatcgcgccgctgccgaagacagtggaatttgtactacgcgaagcaggccaggtgaaagagaaatccgcgatcggcgtcattttctctcctcgctacgcggtgggtaccgtgatgctgtgcctgacctactttatgggtctgctgattttctatctgctgaccagctggctgccgctgctcatccgtgaaaccggcgcctcgatgagtcaggcctcaattatcaccgccctgttcccgctcggcggcgggattggcgtgctgatcctcggcgccctgatggacaagatcaaccccaataaagtggtggccgtcggctggctgctgaccggcgtttttgtctgcctggtggggttctccaccagcagcctggcgctaatgggagtgatggtctttatcgccggcagcattatgaacggcgcccagtcgtcgatgccggcgctggcggctggcttctatccgacgcaggggcgcgccaccggcgtcgcctggatgctgggtatcggccgcttcggcggcatcctcggcgcgttcagcggcgccttcctgatgcaggctcagctctcctttgagaccattttcaccctgctggccatcccggcgttcctgtcagccattgcgctgctgatcaagtaccgggtcagtaaatccgtgccggcgacgacagatgaggcgagaagcctgcagaaagcctaaccctataagccggcgccccgcgccggctttgccgcttttttcttatccgtttacaaaaattttcgaagccacctcatcgcgttaataatcattcttttaggctacgctgccgtttggctgtcggggcagattcgatagcctgttggcaaataatcaccgacgttaccatcccttgcgccattttctgactattcttaatgagctatagaaaaatcttttccgctgtgtgataaaaggagttctcaatggaatataaagatcccgtgtttgaactgctgagcagcctggaacacatcgtttttaaggatgataatcagaaacttacctcaaaccgtaagtccactgtatttagtgaatttgaacagctgcgtaaaggcactggacttaagattgacgactttgccaacgtcatgggcgtgagcgtcgccatggtaagagagtgggagtcgagacgggtcagaccgtctcccaccgagctgaaattgatgcgcctgattcaggccaatccacagctttcacgacaattactcgattaatctcgcgcgcagcggcaaaggccagtaagggagcttttgccgctgcaccgtaaaaaaaagtttgctatcaggtgctgaacgtgcgttaatgctcgcaggtttgatgtacagaccacagagcagtcgaatagagcagtccttctaaggttatccaaagatacccccgtagtgaactttccctttatcgctttaaatctgtagtccagacccctacgccgcaaggctcacttatttttttaaaggtaattcactatgtccggtaaaatgactggtatcgtaaaatggttcaacgctgacaaaggcttcggcttcatcactcctgacgatggctctaaagacgtgttcgtacacttctctgctatccagaacgatggctacaaatccctggacgaaggtcagaaagtatccttcaccatcgaaagcggcgctaaaggcccagcagctggcaacgtaacttctctgtaagttcaagccgctaagaatcgagaatccctgcctgatggcggggattttttttatctgtcgccagtagccgccagcataagatggcggctaccgggcattcaaagcagggaaaagtgccagctcgtctcccgccacgccagactatgggtcagcttcagaccttgtaaaaacgcctcatcatgcgacaccaccagcatcgcgccgggaaacgccgccagcgcgctttcaatagcctgcgtcgatgctaaatcgagatggttggtcggctcatccaacaaaagcagctgggcaggctcgcgtcgccagagcacgcacgccagcgccgctttcaggcgctcgccgccgctgagcgccgacagcggcagagtgaccttatccgcgcccagctggagctgcgccaggcgggtgcgcaggaggccctcatccagtggggtatcttccaggctcaggtgcgccattaccgacagggataaatccagctgcgtcagatgttgatcgaggtaagcggcgctcaccgaaagccggacatcgcctgacgcggcctgctccagccccaacagcgttttcagcaaagtggttttgccacagccgtttggcccctttagcgcgatgcgcatcgggccatcgatacgccagttcagcggcgcagccggcgcatggtcgagctgtaatgactccaccaccagcacctgcttgccggcggccacttcgctacccggcagggtaaacatcactggggtctcttcctcaacccgctcccgcgcctgctgcacggcggcattcagactgctgttctgttcacgatgctgacggcgcagcgttcccgggcgctcttttgccgcgcctttgtacttcacgcgttcgaaggaggcgatatttagcgtatcaacggtacgcagcgtctgagccgagcgccgctgggcggcgtcatgctccttatgcattcgcgcgcgggtgcgccgtcggtcggtcacggcatgctccagcgccgcgcgcgcggcctgctgctccgccatacgctggcgctgatattcatcatagttgccgccgtagctgcgcagcgccgtcggcgtcagctcaattatcctcggcatccgcgtcagcagctcgcggtcgtggctggcgatcagagccccgccctgccagctttccagttggtgatagagccactcccgcccctggcggtccagatggttggtaggctcatccagcagcagataatcggcgcccgagacgaaggcgccgcacagcagagccttcatccgctcgccgccgctgagtgaaaatgcggggcgatcggcagagaacggcgggagatcggcttcacggaacgctaaactcaggcgatcggtgagatcccagtgaccatctaacagatcgaaatcgtcggccagcccttggccctgttcaaggcgagacaaggcggcaaaaaccgacgcatagcccagcagcgtagcgagggtggtctccggcgtgagcgtcggctgctgcgctacccaggcaacggcggcggcgcgctcaatatggccgccggcaggagaatcaaggcccgccagcagacgcagcagacgcgtcttgccgacgccgttccggccgaccaggccgcaaagggacggttccagcgagacgctgagcggaccaaacagggtctgtcccgtcgcaaactgacaggtgacctgatgtaaaacaaaagcggggatgcgggcgcaatgagccataagcactcctgaatgaaatcaatactcccctacccgcaaggtatgcgaggtaaggcgtgaaattcatcagtcgtgtttgttcatttgtggggcgcgctccggtgagacgagggattcgtcgggacataggatagccacactccggtatgcgttgcaagcctgttttattcaacgatcttgtaaaaataaaaaggcctcctgatatcaggaggcaaatgatttatttggtgaacaatgaaagggtgcattgagaatgcctgacaccgcaagcatggtggggatagatccccaccagatgctcttactgtttaatatcacaggctaagaatgccaccagctcaatatttccctgcctgcgctgtaattcacatagcgaatcacgaaccatccaggtcaataataaaatagtgaagcaaatcactactaagccaaacaacagatacttttgcggcattcctcgcctccagtgttgattttcaacaagtaagaggctactcttatggtgttcatgcataggggagcctcactttgattactatcaggtggggcttttctctgtctgtctcccgctgaatacctgagacacacagtctcaagcacccgccgccattctagcgtaaatacctctcagaattatgtttatatattcctaaaacgtttcttctcgatgaatgaaaataatgaagatatcaatgacagaattattaatggttcatctatttatatttcacgtataaaaaaacctgccctgaggcaggtctttattattaccgatacgcttactgcagcagagaaatatccgccacttgcaggaacagttcacgcagtttggacagcagcgtcagacggttgatgcgaacatctttgtcttcagcgttaaccatcacgttctcgaagaactcatccaccggctcgcgcagcgcggccagctcgatcagcgcatcctgataacggcctgcggcgaaatacggctgcagcttgtcgcgcagcaccaccagattacccgccagcttaatttccgccgcttctttcagcaccgaagcgtgaacgatgtcgttcagcgtctcatcggatttcgcgaggatgttagagacacgtttgtttgccgccgccagcgcggaggactcttccagagtacggaagtgcgataccgccttcatacgcgcatcgaaatccgccgggcgggttggacgacgcgccagtaccgcctggatcgtgtcgacgccgtagccttcgtcctgataccaggcacggaagcggcccagcataaagtcgatcacatcatcaaccacgttggcgttggtcagcttctcaccgtacagacgaaccgcttcttcggtcagcgtctgcagatcgagatccaggttcttctcaacgatgatacgcagcacgcccagcgcggcgcgacgcagcgcaaacgggtctttatcgcctttcggatgctgaccgataccaaagatacccgccagggtgtccatcttatcggcaatcgctaccgcgcaggccaccggattagatggcagcgcgtcgccagcaaatcgcggctgatactgctcgttcagcgccacggccacgtcttccgcttcgccgtcatggcgcgcgtagtgcatccccatcacgccctgggtgtcggtgaactcgaagaccatgttggtcatcaggtcgcacttggacagcaggcccgcgcgggttgcgtggttcacgtcagcgccaatcttttcggcaatccaacccgccagcgcctggatgcgatcggtcttgtcgcgcagagtcccaagttgctgttggaacagcacggtttccagacgcggcaggttatcttccagacgttttttacggtcggtattgaagaagaactcggcatcggccagacgcggacggaccaccttctcgttaccggagatgatctgctgcggatctttggactcgatgttggccacgaagataaagttcggcagcagtttgccggcgttgtcgtagaccgggaagtacttctggtcgcccttcatggtgtaaaccagcgcttcagacggcaccgcgaggaatttttcttcgaacttcgccgtcagcaccaccggccattccaccagcgaggtgacctcttccagcaggctttcgctcagatcggcttgaccgccaatcttacgcgccgcctcttgcgcatcagctttgattttggctttacgctgttcgtaatcggcgatgactttaccgcgctccagcaggatctgcgggtactggtcggcatggtcgatggtgaactccggctcgcccataaagcgatggccgcgaatcacgcgatcggacggaataccgaggatagtggccgggatcactttgtcacccagcagcaaagtcaccgtgtgtaccggacgcacgaagtggacgtcagacgcgccccagcgcatcagtttcgggatcggtagcttcgccagcgagctggcaatcatgttcggcagcagcgcttcggtgctttcgcccttcacatgggcgcgatacagcaaccactcgcctttgtccgtggtcagacgttcggcctgatcgacggtgataccgcagccgcgcgcccagccttcggccgctttgcttggcttgccttcggcatcgaacgcctgggcaatagccgggccgcgtttttccacttcgcgatcggcttgcgccgccgccaggttggccaccttcagcgccagacgacgcggggcggcaaaccattccactttaccgtgcgcaaggccagcgttatccagctccgcggtcacattcgcagcaaaagattccgccaggctgcgcagcgcttttggtggcagctcttcagtgccgatttccaccagaaaagtattctcagacatggccgcctcttatttattcttgttgcacatcgggaagccgagcgcttcacgggaagcgtagtacgcttccgccactgctttagtcagggtgcgaatgcgcaggatatagcgctgacgctcggtgacggagatggctttacgcgcatccagcaggttgaagctgtgagccgctttcagaatacgctcgtaggccggcagcggcagcggggtctccagcgccagcagctgctgggcctctttctcatactgttcgaagcaggtgaacaagaagtcgacgtcggcatattcgaagttataggtggactgctccacttcgttctggtggaacacgtcgccgtaggtggttttccccagcgggccatcgctccagaccaggtcatagacgctgtccacaccctggatgtacatcgccagacgctccagaccgtaggtgatctcgccggtcaccggcttacactcgaggccgccgacctgctggaagtaggtgaactgcgtcacttccatgccgttgagccacacttcccagcccagaccccaggcgcccagcgtcgggttttcccagttgtcttcgacaaagcgaatgtcgtggatagtcgggtccatacccagctctttcagcgacccgaggtacagctcctggatgttgtccggagagggtttaatcaccacctggaactgatagtagtgctgtaaacggttcgggttttcgccatagcggccatcggttggacgacgggaaggctgcacgtaggcggtcgccatcggctccggtcctaacgcgcgcaggcaggtcatcgggtgagaggtgccggcgccgacttccatgtccagtggttgaacaatggtgcagccctgacgagcccagtaatcctgtaaggtcaggatcaggccctggaaggtcctggtatcaaacttttgcatatgatttcgtgctggatacgtgtggatttaaaggaaggagtcagtatacccgctggctgcgagatatacagtacgaaacggcgttgtttcaggaaaacggacgaaatttacgccaggcggggtcgattcagcgcatcgaaagatgcataaactggccgtccgggtcaaaggaacagatgaaacgctcattcttgccggtacggccagaaagctcatagctcgcctggaattgttcaaagtggttcacgtcaacgagctgcgtttgcgtgttatagcggatagccgcctgatccttgcaaagctgcgccatattgagcgtggtttgcggcgtaatacgagcgcgctgcgctttttgcgtcggcggggagacggtctcgctgcagcccgcgaggagcagcaccagcatgacggaaacaacacctttcaccacgttctcctccaccgccttgttagcaagttgttatcctaaagattcagtattacaggtattttgcgaatatcatgaaactgcgacaagtctgtgaccgaaaactcagactaatctattgcgacaccgggaaaccgggcaggtcatatcttatttctccagcagacattgagggactgatgcaagaaaagatacactggatcaccaacctgcgcggcatcgcctgcatgatggtggtgatgatccacagcaccagctggtatatcactcacccccatgcgattaccctgctgcaatgggatatcgccaatctgctcaattccgcctcccgcgtcagcgtgccgctgttttttatgatctcgggctacctcttttttggggaacgcagcgcccagccgcgccatttctggcggattggcctgtgcattgcgttctatagcgcgctatctctgctgtatatcacgctgtttacccatatcaacgtcgagctgtcgttaaagaatttgctgcagaagcctgtcttctaccacctgtggtttttctttgctatcgccgtcatctacctgctctcgccgctgattcaggttaagtccaccagtagcacaatgctgctggcgctgatggcgatcctcggcattctggccaaccccaatatggtcagcgttaaagccgccggaattgagtggctgccagtcaacctttatatcaacggcgacaccttctactacgtgctctacggcgtgctgggcagagccattggcaccctggacaccgataaaaaatggctaacaccgctctgcgccgcgctgttcatcgccgccgtgtgggtcatttcccgcggcacgctgcatgagctgcgctggcgcggagacttcggcgacacctggtatctctactgcggaccggcggtgtttgtttgcgcggtcaccctgctgacgctggccaaaaactggcttaacgcgcgtcccctgcccggtatcgcctgcattgcgcgacattcgctggggatctacggctttcatgccctgatagtgcatgcgctgcgcgccagccatctggagctatcccgctggccgctgctggatattgtgtggatatttagcgccgccctgctcggcagcctgctgctgtcaggcctggtgcagcggattgatagccgccggctggtcagctaacggtccgccgcccggaggggcccgacttacgtctcaggcccctcttccgtcacgctgagaggttcccgtaagcgcgtcgggtcccagacatcacgcacgtttttctgtaccgcaacagcgccaaacaggctcaaaaaatacgccagcccatagaaccctttctcgctgagcagcagagtggcattccacagtccgataaccagcagacctacagcgataacgaagatcaccagacaggtggtgtagtacagcgcggtggtcggaatggcttcatacttatcgcgcaccgtcttttgataagatgccgcggcaaacagccccagtaccaggacggcaaaataatagcctttctcattcaactgcatatcggcattccacagccccaccagataggtgacgatgccgccgatcagggcaatccaggagatcaaatgaaacgcaggagaatacgtcgcgtgcttgttttccatcactttttaccttttacgcgcctcggggcggcgcttattccgttttttgcatcgcgcgggcgatgcgggtccgttcgggggttgccgatgcgccatataagcagacaaaccatgccgcgatatagacggctttttcatgccagtctgccggtacataccaggcgccgaccagcagcaggccgaccgatagcagcagcaccagccggcataaggcaataaaaccgtcgtcctgttcctgccactgactggcgcgctgatgggcgagaacagcaaacatccccatcaccagcacgccgagaaaataccctttgccgctgaacagcgggcaggtccgccagataccgagcagataaaccagcgatcctgtcgccatcatccccctggcaatattgcgttttgtgatcatctcacctccctggtcgacaggggctgattatgaccgactccctcggcgatgcctcagattacgtacgacaaagcggagatttcggaataaataaatacgcatttatggatggatgtagccgggacattcaggaagggaatccgcccggcgctgccggacggactgaggctaagacatcagcggtttcagttgctgataaatctggcggaaggtttcccgctgcggcgcatagtgggccacacggcgatcgtccgggcgatgggcttgttcaagcggcagcggcttcagcagcccggggcggtctgcctcgtcgtgaaccgccagctgcgccagcctggccgcccccagcgccgggccgacatcgcccccggtacggtaatcgagctgcaggccgctgatatccgccagcatttgccgccagtaagcgctgcgcgccccgccgccgataagcgtgatgctctgcggcttgatgccgcaggcgtgcaccacgtccataccatccgccagcgcatagcccaccccttccagcaccgcccgcgccagctctgccggcccatgctgatgcgtcaggccaaaaaagacgcccttggcctgcgggttgttgtgcggcgtgcgttcgcccgacagatagggcaggaaccacaccggaccggcgctttcatccgccgtctgcgccgccgcgatcagcgccggcacgctggcgagaccggttaattttgccgcccagtccagacaggaggccgcgctgagcatcaccgacatcaaatgccagcggcccggcagggcatggcagaagctgtgcaccgcgctttcgggtttgctaaggaacccttcactgacggcgaagtagacgcctgaggtgcccagcgacagcatcgcctgaccggcatcggccatgccgaccccgaccacgcccgcggcgttgtcgcccccgccgcccaccaccagcgccggcggcatattccacgcctgcgccacctcaggtcgcagttgcccggtgacgtcgctgccttcgaacagcgctggcatcgcatcccgactgagatcgcaggcggcgagcatctcgtcgctccagtcgcgccgggcgacgtccagccacatcgtgccggcggcgtcagacatatcgctggcgagctcgccggtcatgcgcaggcgcagataatccttgggcagcagcactttatcgacctggctgaacactgccgcctcgtggcgctgtacccataagagcttcggcgccgtaaagcccggcatcatcaggttgccggtgatctgcctggaagcgctgactttgtcttccagcagctggcactcttcggcgcagcggccgtcattccataaaatggccggacgcagcacctgtaacgatttatccagtagggtggcgccgtgcatctgcccggcaatgcccagcgccttcacgtcgcgcaggctatgctgcgcgcccagggctttcatcgccgtgtccgtcgccagccaccactgttcgggatcttgctccgaccacagcggatgcggacgcgagacggtgagtttttcggtatgcgatgccactacctcaccctgctcattgagcaggatggctttgacgcccgacgtccccagatcgatgccgatatacatactccctctccttaaacgcgcgccacggctgagcgtggcgcgaacagagcatcctggttgcggcgccggtcaccccgggcgccgccgcatgattacttgtcaaacagataatggttgaccaggttttccagttgttcctgctggccgctgcgatgctgcggcgccagctgatgctgagcggcatactgggcaatatcgctcagggtcatctgcccgttaaggatctgctgccccagctcaccgttccagccagcgtagcgtctggccacgcgcttatccagttcgccgtcctcgatcatccgcgccgcgaccttcagcgatagcgccatggtatccatcgcgccaatatgaccatagaacagatcgtatttgtcggtgctctgccggcgcactttcgcatcaaagttgagcccgccggtggtgaagccgcccgctttgaggatttcatacatcaccagcgcattctcttcgacgctgttcgggaactggtcggtatcccagcccagctgcggatcgccgcggttggcgtcaacggagccgaacagccccagcgcgatggccgtcgcaatctcatgatggaacgaatgaccagcgagcgtcgcgtggttagcttcaatattcagtttaatctctttttccagaccaaactgtttgaggaagccgtaaacggtagaggcatcatagtcatactgatgcttggtcggctcctgcggtttgggctcaatcagcagcgtgcctttaaagccgattttatgcttatgctccaccaccagctgcataaagcggccaatctgctcacgctcctggcgcaggtcggtattcagcagggtttcatagccctcgcgaccgccccacagcacatagttttcaccgcccagttgatgggtggcattcatggcggtgaccacctgggtggccgcccagctaaatacttccggatccgggttggtggccgcgccggcgccgtagcgcgggttggtaaagcagtttgcggtcccccacagaagcttcacgccgctctgctgctgtttctcagccagcacctcgaccatccgggcgaagttattgctgtactccttgagcgaagcgccttccggcgagacgtcaacgtcgtggaagcagtagtaaggcacgttgagtttatggaagaattcgaacgccacatcggctttgcgtttggccatctccagggcatcgccaggctgctgccagggacgatcaaaggagcccacgccaaacatatcggcgccattccagcagaaggtgtgccagtaacaggccgcaaaacgcagatgatcttccatccgtttgcccagcaccagttcatccgggttgtaatgacggaaagccagcgggttagtggatttcgggccttcgtaacgaacgcgatcgagttgatcgaaataggtctgcatagagaactccatattcagagatgcggcgaataaccaatcagataccctaaataattcgagttgcaggaaggcggcaggagcgcaagtccccggtaaccaggggcggagcaacgaatgtcaccaacccacctacaacttgaagtatgacgggtttaagccaatatagaatttcgctttcattttcctcaattacgttatttcacaccgccattgagagaatccacaaacgtgcgccagctcgcaaaaataatatccagtcgccgttgcgccgctctgtcagagacagtccagtgcaataataagagcgtgcatgaataaaatacgatcgccgtcataatttgcacattaaacgaaatttcataacggcaaaataagaaccggtaattgccagccctgctttccgcgttaagaatctgtaacgtatccgcaacctcatgtatcaaacattattttccgttcgtcttacctacccttacaaaaaaggtatcgttattatgaagataaagaacctttgccttacgctttgcgccagctccctcctgctcgccagcatggcggggatggcgaaagaagtgaagattggcatggccatcgacgatctgcgtctggagcgctggcagaaagaccgtgatattttcgtcaataaagcggaatccttaggcgccaaagtttttgtccagtccgctaatggcaatgaagaaacgcagatgtcgcaaattgaaaacatgatcaaccgcggcgtcgatgtgttagtcattattccttataacggccaggtactcagtaacgttattaaagaagccaagcaggaaggtattaaagtcctggcctatgaccgtatgattaataatgccgacattgatttctatatatctttcgataatgaaaaagttggtgaaatgcaggcgcaaagtctggtcgacaaagtgccgcagggtaattatttcctgatgggcggttcgccggtggataataacgctaaactgttccgcgccggacagatgaaggttctcaagccgtatgtcgatgatggcaaaattaagattgtcggcgatcagtgggttgacggctggctgccggagaacgcgctgaaaataatggaaaacgcgctaacggcgaataataacaagatcgatgccgtggtcgcctccaatgacgccaccgccggcggcgccatccaggccttaaccgcccaggggctggccggcaaagtggcgatctccggtcaggatgctgacctggcgggcgtgaagcgcattatttccggtacccagacgatgaccgtctataaaccgattaccaccctggccaccaacgccgctgaaatcgccgttgagctgggtaacgataagcagccgaaggccgataccacgctgaataacggcttaaaagacgtcccttcgcgcctgttaacgccaattgaggtgaataaagaaaatatcgacgccacggtgattaaagacggtttccataaaaagagtgaactgtaatggctgacgccccgctgcggggcgtcattttcatcccgccggatatcactgttgcggagtctttatgacctggctactcgaaatgaagaacatcaccaaaaccttcggcgctgttaaagccgtggataacgtcagcctgcgcctgaacgcaggcgaggtggtctcgttatgcggtgaaaatgggtcggggaaatcgacgctgatgaaggtgctgtgcggtatctatccgcacggaagctatgagggcgagattatttttgccggcgaaacgctgcaggcaaaccatattcgcgataccgaacgcaaaggcatcgccattattcatcaggagctggcgctggtgaaacatctcaccgtgctggagaatattttcctcggcgccgagatctcccgccatggtctgctggattatgaaaccatgacgctgcgctgtcagaaactgttggcgcaggtcaatctgcccatttcgcccgatacccgcgtcggcgacctcggccttggtcagcagcagttggtggagatcgccaaggcgctgaataaacaggttcgcctgctgatcctcgacgaaccgaccgcctccttaaccgaacaagaaaccgcgacgctgctggcgatcgttcgcgatctgcaaaaccacgatatcgcctgcatctatatctcgcataagctcaatgaggtcaaagcgatctccgatacgatctgcgtgatccgcgacggccagcacatcggcacccgcgatgccagcggcatgagcgaagacgatatcatcaccatgatggtcggccgcgagctcaccgcgctctatcccagcgagccgcacgcccacggcgaggagatcctgcgggttgaacatttaaccgcctggcacccggtaaaccgccatattaaacgggtcaatgacgtctcattttccctgcgtcgcggagaaatcctcggcatcgccgggctggtcggcgccggacgtaccgaggcggtacagtgcctgttcggcgtctggccggggcgctggcaaggggagatctttattgatggccagccggtgagcatctctaactgccagcaggccattgcccacggcatcgccatggtgccggaagaccgcaaaaaagacggcatcgtgccggtgatggcggtgggcaaaaacattaccctcgcggcgctcaaccagttcaccggcgcaatgagcagcctggacgacgccgccgagcagcactgcattcagcagtccattcagcgtttgaaaattaaaacctcctcgccggagctggcgattggccgtctgagcggcggcaaccagcaaaaggcgattctggcgcgctgtctgctgctcaatccgcgcattctgatcctcgacgaacccacccgtggcatcgatatcggggcgaagtatgaaatttataaactgattaaccagctggtgcagcagggcatcgcggtcattgtcatttcatccgaactgcccgaggtgctcggtctcagcgatcgggtgctggtcatgcacgaaggcagactaaaagccaatttggttaatcaacatctgacccaggaacaggtgatggaagccgcgctgaggagcgaacgccatgtcgaagaacacgtcgtctgaaatcaaactcaccccaaccgcccccgcggccctgccggcgctgaaggggctgaatctccaggtcttcgtgatgatcgccgccatcgtcgtcattatgctgtttttcacctgggttaccgatggcgcctacctgagcgcacgcaatatctccaacctgctgcggcagacggccatcaccggcattctcgccgtcggcatggtgtttgtgattatttcggcagaaatcgacctctccgttggctcgatgatggggctgctgggcggcgctgcggcgatctttgacgtctggctcggctggccgctgccgctcaccattctggtgacgctggtgatgggcctgctgctcggggcgtggaacggatggtgggtagcctatcgcaaagtgccctcgtttatcgtcacccttgccgggatgctggcgtttcgcggcattctgatcggcatcaccaacgggaccaccgtctcgcccaccagtccggcgatgtcgcagatcggccaaagctacctgccagacggcatcggcttcggcatcggcgttgtcggcatggcggtgtttatcgtctggcagtggcgcgggcggatgcgccggcaggcattaggtctggcgacctcgtcctccaccgccgccgtcggccgccaggccattaccgcggtgattgtgctgggcgcaatctggctgctcaatgactatcgcggcgtaccgaccccggtgctgatcctcgccgccctgctgctggcgggcctgtttatggccacccgcaccgcctttggtcgccgcatctacgccatcggcggcaacctggaggcggcccgtctgtccgggattaacgtcgagcgtaccaagctggcggtgtttgccattaacggcctgatggtcgccattgccgggctaatcctcagctcacggctcggcgcggggtcgccttcggcgggcaatatcgccgaactggacgccatcgccgcctgcgtcatcggcggcaccagcctggcgggcggcatcggcagcgtcgccggggcggtaatgggggcgtttattatgtcggccctggataacggtatgagcatgatggacgtcgccaccttctggcaatatatcgttaaaggcgccattttgctgctggcggtgtggatggactctgccaccaagcggcgcgcataaggagagactctctgaagaatgtctgaattctttgcgctaccgccaaacttcgccataaggcgcttgaaatatctcgggcattagccggtagtgtatacccaacatcattcgggttgcagacggcgcccccggccgcgtaccggcgtacgtggccgggatgagtggtaagtcaggccatcggcaacatcttgaatgaaggggtatgaccggggttagagcaggaacattatctatgtttgaaaagcgtcaccgtattacgctgttatttaacgccaacaaagcttatgaccgccaggtagttgaaggtgtcggcgagtatctgcaggcctcccagttggaatgggatatctttattgaagaggactttcgggcacgcatcgaaaacatcaaagagtggttgggcgatggcgttatcgccgactatgacgatcccgaaatcgaaaagctgctggccgatgtccacgtgcccatcgtcggcgtcggcggatcttatcatcagccagagcagtacccgccggtccactatatcgccaccgacaacgccgcgctggtggaaagcgcttttctccatttgaaggaaaaaggggtgcaccgcttcgcgttttacggactccccacctccagcggtaaacgctgggcggtagagcgcgagtatgccttctgccagctggtcgcgaaggagaagtatcgcggcgtggtctaccaggggctggagacagcgccggagaactggcagcacgcgcaaaaccggctcgccgactggctgcaaaccctgccgccgcaaaccggcatcatcgccgtcaccgacgcccgcgcccgccacgtcctgcaggcctgcgagctgctgcatatcccggtgccagagaaactgtgcgttatcggcatcgataacgaggagctaacccgctatctctctcgcgtcgccctctcctctgtcgcccagggcacccgccagatgggttatcaggcggcaaaattactccaccggctgttgaataacgaggccctcccgctgcagcgccagctgatcccgccgatgcgcgtcgttgagcgacgctccaccgactaccggtcgttaaacgatccctccgtgatacaggcgatgcattacattcgcaacaatgcctgcaaaggcatcaaggtggaacaggtgctcgacgccgtgggcatctctcgctctaatctggaaaaacgcttcaaagaggaggtcggggagaccatccacacggtgatccacagcgaaaaactggaaaaggcgcgcagcctgctggtgtccactagtctgtcgatcaatgagatttcgcagatgtgcggctatccgtcgctgcaatatttctattcggtgtttaagaaggagtacgacgtgacgccgaaggagtaccgcgatcggcacagcgaggtgatgctgtagggtaaaaaaatgcccggcgacaaggccgggcatccggattacagatgagcggcgatgagccgctgattgtcctgatacatcgcgaagagatagttgttgtagctcgaccctttggtcgaataccccttcagcttatggatcatggtgctggcagttacttcctgatccgccttgcgcagctgcaggcgcgacttgcggaaagaagaataggccgggtgggtgttcaggtttgttacgtaagcctgcaccgactgctctaccgactcaaactgcgagtaacctttcatcgcgccgcggcagcgaccggcgccgcacttcatgccgaacaggttgttattctcgcgcgccagcctggaggtaccccagccactttccgccgccgccatggtcgccaccatgctgttcggaataatgtcgacacgctcaagcagcgcgttccagggcacatgacgcgtattgcctgaccacttcaccttataacgggaagcgatatccttcaggcgcgccttctcagtcggtgaccagcgagcatcgtactgcttggaaataagccagttacgatccgcagtaatcgcctgattctgcttggtaatataaggcatgaccgtccggagaaacgcttttttccttggtgttccggaagggtattttcgcaagtcaggaagtgaactgctctttacactattgcgagaatactcttgtttactgcttaccttagtactacttatcttctttaccgttggggctttatgactctttgtcgctgtgtgcgttgtcgccaacacactacctgaaaagatgcaggttagtaacataagtatggcggccccatatcgtcgtatgggattcgatatcatcaggtctcctggtcggatatatgcattccaacaccttgtttttcacaaaaaaacgatagctgaatcgctaatagtatcaaaaatacgcactgagggcatcaacagaaatagtccaattccgaattgctgtcatctgaaatcggtttctgcggcgcatcgccagcgcgaaaatgctagcttcgtctcatttttagcctattttttgagcggtgtcactcaccccttttcatcctcctggtaaaacgcgcgtcaggaggagttcacccgcgcggcgacaaggcacactagataaaaaccgctcacaggatctcgcaatgaaactcgctgcgcttgccacgttattcgtgcctgggatggcttttgccgcctggactaccaccgactttcctgcttttaccgaagaagggaccggccgattcatcagccagaaagtggttgagaagggtacacgtcccctgcagctaaattttgaccagcagtgctggcagccttccggcggcattaagctcaaccagatgctgtccatggagccctgtcgcggcacaccgccgcaatggcgcatcttccgccagggtctgtataccctggaggtggatacccgttccggcacgccaacgatgatgatttcgctggaggaaaaagagaccagcgccgcggcgccgcagatccgccagtgtccgaagtgggacggaaaaccgctgaccatcgacgtcagcaaaaccttcgccgagggcagcaaggtccgcgatttctacagcggcaatgtcgcgaccgtcagcggcggcaaaatcaccctgcagcccgccttcggcagcaatggactgctgctgcttgagcgcgccgagaccgccgccccggcgccgtttgactggcacaatgccaccgtctacttcgtcctgaccgatcgcttcgtaaacggtaacccggccaacgacaacagctatggtcgccataaagacggcatgcaggagatcggaaccttccacggcggcgacctgcagggattaaccagcaagctggattatctgcagcagatgggagttaacgccctgtggatcagctccccgctcgagcagatccacggctgggtcggcggcggcacgaagggcgatttccctcactacgcttatcacggctattacacccaggactggtcgaaactggacgccaacatggggaccgaagcggatctccgccgactggtggatgaagcgcataagcgcggaatacgtattctgttcgacgtggtgatgaaccatgccggctacgccaccctggccgacatgcaggagttccagttcggctccctgtatctgcaaggcgatgagctgaaaaaaactctcggcgagcgctggacggactggaagccgggcgcgggacagacctggcacagctttaacgactatatcaacttcagcgacaaagccgggtgggagaaatggtggggtaagaagtggatccgcaccgatatcggcgattacgacaatccgggctatgacgatctcaccatgtcgctggccttcctgccggacctgaaaaccgaatcgaaggaggtctcaggcctgccgaacttctatagccataaaccagacaccgcagcgaaagcgatcccgggctatacgccgcgcgactatctgacacactggctgagccagtgggtacgtgactacggcatcgatggcttccgcgtcgataccgccaaacatgtggagatggacgcctggcagcagttaaaaacccaggccaccgccgcgctggcggagtggaagaaagccaatccggataaagcgctggatgcggcgccgttctggatgaccggcgaagcctggggacatggagtgatgcagagcgattattatcgccacggttttgatgcgatgatcaatttcgactaccaggaccaggcggcgaaagcggcgacctgtatggccaatattgacctcacctggcagcaaatggcggacaagctgcagagctttaacgtcctgagctacctctcctcgcacgatacgcggctgttccgcgaaggcggcaccaccgcggcggagctactgctgctggcccctggcgccgtgcagattttctatggcgacgaatcatcgcgcccgttcggccccaccggctcggacccgctgcagggtacccgctcggagatgaactggcaggatgtcaacggcaaggcggcccgcagcgttacccactggcagaagatcggccagttccgcgctcgccatccggcaatcggcatgggcaaacagacaacgctgtcgatgtcgcgtggttatgggttcgtgcgtgagagcggtgaagacaaagtgatggtcatctgggccgggcagcagcagtaatccacatgtggctctccgccctgcggggagccaccattcagcacaaaatgctaacaaaatagcaatatacaggataaagataaaaatccgcctcctcccgccgatttgcaccatgccagcgctggcgttatggttagccactttccagaaccaccgatagactattcgcgatgacattttcccttttcggcgacaaattcacccgtcattcaggcatcacccgcttgatggaagaccttaatgacggtctgcgcacgccgggcgctattatgctgggcggcggcaaccccgctcagatcccggaaatgaatgactacttccagcagctgctggccgacatgctggataatggcaaagcccttgatgcgctttgtaattatgatggtccacagggcaaaagcgagctgctggctctgctggcgaacatgctgcgcgacgagctgggctgggagatcgaaccacagaatattgcgctaacaaacggcagtcagagcgcatttttctacttatttaatctgtttgcaggccgtcgggcagatggcaccacccgtaaggtactgttcccactgacgccggaatacatcggctacgccgatgccggtctggaagaggatctgttcgttgccacccggccgaacatcgaactgctgccggaaggccagtttaagtaccatgttgattttgagcatctgcaggtgacggaagagaccgggatgatctgcgtctcgcgccccaccaacccgaccggcaacgtcatcactgatgaagagctgatcaaactggatgcgctggcgaatcagcacggggtcccgctggtgattgataacgcctacggcgtgccgttcccgggcattatctttagcgacgcccgaccgctgtggaatccgaacatcgtgctgtgtatgagcctgtccaagctgggcctgccgggcagccgctgcgggattatcatcgccaacgaaaaaatcatcaccgccatcagcaacatgaacggcattatcagcctcgcccctggcggcatcgggccggcaatgatgtgcgaaatgattaaacgacaggatctgctgcgcctgtcagagacggtgatcaagcccttctattaccagcgggtgcaggaaaccatcgccattattcgccgctatctgccggaggagcgctgccttattcacaaaccggagggggcaatcttcctctggctgtggtttaaggatctgccgatctccaccgagctgctgtatcagcggctgaaaaagcgcggcgtgctgatggtgccgggggattacttcttccctggtctggataaaccgtggccgcacacccaccagtgtatgcgcatgaactatgtaccggacccgcaaaaaatcgaagccggagtgaaaatcctcgccgaagaggttgaatttgcctggcgcgaacaggaagcataatctctgacgccgcgggcgggtaacgttcgtcagcgaccccattcacgccagcgccagccgctggcgtttttgcgcgcatagcgcttccagctccgcgggaaccatcacccgcagcgcctgcgtcgggcaggcggccacgcaggccggtccttcggcgcggtgatggcatagatcgcatttcaacgcctgcgcctgctcgttcattaccgtaacggtcatcgcgccgtacgggcaggccaccatgcagcttttgcagccgatgcagcgccgctggtcgacccaccagacgtcattgtcgcgctgaatcgccccctgtgggcaaacgctggcgcagggcgcatcctcgcactgccgacaggccatcgccgtcgatatgtcaccgcttttcaccacccggatacgcggcgcgaaatggttcgtcgacagggcggcgacatcctgcgcctgctggtgcgccaccgcgcaggccacttcgcaggtacgacagccgatgcaccgctgggcattggcaataagaaactggttcatcctctgctccctggggataaaaccgcagggtgccagaatatcccctgcccgcgctttgatcctgaatggaatcagcgctgttttttgtcagatggccggcaggatgtggtcatttgcctgacgcttcacgcaccgtgaaacccagctcacgcgaaattgcttcggcggtctcacgtagtggttttaacaagttcttttcgccagctccccggcacgaagtccgccggggagccgacgttaatgattaccggaacaatgccttatcgcgcaggatatgatcgttgccgcgacggcgggtgaagccaatccgatcgaaatactccaggatctggatcgccagcttccgccctacgtttaaggtatcgcggaaatccgccgcgcaggttgaaccgcgcagccgatccagctcgcgcacccgctgggcgaattgcacaatgcgatcgttgcggtagtaacgatccttgacgatcgcggtaatcatcccctgctgcgccgcctggcgcagcaccgcgcgcatcagggactcttcaacatggacttcgcgcgcaagatcgcgcacccaccacggatcgtcgccgaacaaagtctccaccttctgccagaccgcctgctgctcgtcggtaaacccggctttatgctccggcaaatgcagccagccgtgatggctgtggactaagccgctctcgcgcatctgctcaatcagcagcagcaccagcgcttcatcttccatcggcagcgcgatgcggcgcaggcgctcccggccagggcccggctcgtctcgatgctgctcatggtagcgcgcaagggcatccagcaattttcgctgccagcgggcggcaagcggcgcgctaagcaggcgctgtccggcctgcagatagtccggtcgctggatcagggccgccatcccggcttcgctgagctgccgcgcccaggcgaagcgctcaagccggacggcatcccgctgcagatgcagctccagcgcctgcgcatcgtcagcgccgaccgccgccagggcgtgcagccactgcagatattccggtttacgtttgccgcgacgcggaggatccagcgtcaccacccgtgcgcccgccagcgtcaagcgagcggagatatcgcggagcaccagccggtcgttatccgccagccacagcggagtatccagcaccagctccgccaggttgccctcaagaagcgacacccggccggtaatgtggctggcagcatggtgaatatgcagcggctgccactggctgagcggcgtatggcactgcagctcgacaatcacccgttctgctggctccggcggtggtgaggagagcagccagtcgccgcggtgcactgcctctttttgcgcatcgccgacaatattcagcgcaatgcgctgtccggcgtgcgcctgctcaaccgcttgattctgggcatgcaggccgcggacgcgcatcggcgtgttgacgccggtaagccatagggtatccccgacccgtacttcgccggagagcgccgtcccggtgaccaccagccccgcgcctttgacggtaaaagcgcgatccagcgccaggcgaaaccgctgctgctgcgggcgggggcgctccgcaagctgcagcagatggctgcgcagttccgcaataccgatgttttccgccgccgcggtgggaaagaaagcgacggcgtcaaagcccagctcgcccagggtctgctcgacctctgcctgaacctccgccaccctggcggccgccacgcggtccgttttggtcagcgccacggtcagcgtcggctttccggtcagctgcaggatcgccaggtgttcgcgggtttgcgccatcaccccgtcatcgcaggctaccaccagcagcgcatggtcaataccgcccgcccccgccagcatgttggacaaaaacttttcgtgcccgggaacgtcaataaatcccagcacccgcccgtccggctgcggccagtaggcatagccgagatcgatcgtcattccccgcgctttctcttccggcagacgatcggcattcacgccggttatcgcctgcagcagcgtcgttttgccgtggtcaacatgtccagcggtggcaataatcatcgtaacaacatctccataaagcgggtttcatcttccagacagcgcaggtccaaccagagccgaccgtcataaatgcggccaatcaccggacacggcagcgcgcgccagcgggccgccagcgcctccagccggctaccgcggccgtcatgcggggtaaaggtcaacgccgcgctgggcaggcggtcgacgggtaacgaaccgctgccaatctgcgactggcaggctgccacgctgacggcaaagtcagcatagtgtgccgccaggtcaggcagcaggcgttcagccagccggcggatctcttccgccggacgggtgagcaagcgcagcgtcggtaatctctccgtcagcacctccgggtgctgatagaggcgcagcgtggcttccagcgccgcgagggtcattttatccgcgcgcagggcccgcttcagcggatggctttgcagccgggcaatcagcgcgcgtttgccgacgataattccggcctgcgggccgccgagcagcttgtcgccagagaaactgaccaggctcaccccggcggagatcatctcctgcggcatcggctccttcggcaggccatactggctgagatccaccagcgacccgctgcccaggtcggctaccaccggaacatccagttcgcggccaatggccgccagctccgcttcgtcgacggctttggtaaagccttcaatgctgtagttgctggtgtgaaccttcatcagcagcgcggtattgtcattcaccgcctgacgatagtctttggcatgggtgcggttggtggtacccacttcgtgcagctgacaacccgcctgacgcatcacatcaggaatgcgaaatgcgccgccgatctccaccagttcgccgcgggaaaccaccacttcgcggccgctggcggtggccgccagcatcagcagaacggccgccgcgttgttgttcacgatacaggcatcttccgcgccggtgatctggcacagcagatcggcaatggcgcgatcgcgatggccgcgcccggcgtcgtcgagatcatattcgagcgtcaccggcgcgcgcatcgcgctggcaaccgcctccacggccgactccgcctggatggcgcgccccagattggtatgcaataccgtaccggtgagattaaacaccggacgcagggcgctccgctggccggcggtgagccgctgctcacaggcgtgcagccagtcatggctccagtcaggcagtgtctgacactggcggatctgttcccgcgcctcgtccagcatctggcgcagctgcgtcaccacctgcgaatggccgtgctgcgccagcagggaggaaaaagcggggtcgcggagtaagcggtcaatggccggaagccgggtataaagcgcacgaatttcggtagtcatgaatgggcctggcggtaagttattttcccccctcccgacgggagagggagtcaacaatcagcggcgattgtaacgcctccttgcgcaaactgttacctgcctgggtcaagtccgcggcggttcagtgcgcgcaaagctggcgcgctggaacagcgcatccaccagcttcaccagctgcggccgggtggcgcaccagccgggcgcgacccggcgaaagttcagataagcaatggcgcaggccgtggaaatggtcgccagattaacctcgtcgccgcgcagcgttccgtctgccgcgcaggcttccagcctgtcgagaccgcgagccactttctcccgctggcggagcagttcttgctctgactgttgcgcacccgggcgagccttttcacgcaccagcgcctgggcggcctccatcacgccatccgccagcgcctctagctggcgcatcctgagagcggctctggggtcggcggggatcatcggcggcgctacgcccagcagctccagatactgggcgatgaccggggagtcaaaccagcactcaccgtcgtccgtcaccagcgccggtaccttgcccagcgggttatagcgcgccacaccgttgctttcgctgtagggggattcgttgacaaactcaaaagggatgcgcttttccagcaggatcaccgatattttgcgcacaaagggactggtgtagctgccgatcagtttcatagcctgctccttatcgccaacaaattatcgccaacaaagatatgagtatggctcagggcaggacaaaaggcaggtgagcgtccggctcaacctgccgccgatcgcattaatgatcgacatagaggtagtgcatccagctggtcatccgcagcagcactttacgcatcaccgagacgtgggtgaaatggtcggagtagagcgccacctgcgcgtagataccatcgggtaatgctgatagcccttgttcaagcgatcgcgttccgtcgacacgcgggtggtattggcctggcctcagagagctgcggcttggggacgttaatacagtacagcgtcgttaccaggttggcctgcaggcggtcgactcgcgcctgattgggcgccgggtcaatcgtaaatagcgcctcgcctttctcgacgcgctgagtggctctatcggttcggctttacgggattatttatatgattttattcacaatatactgatattcgccccgctattttgaggataattcacgcctttcatttatgccatccggcgtaaaaaagttattcggcaattaaggttgcttagttacagggtcatcccggcgtggaagcaaaaccgggccgagatcacagcggcgtaaacccctcgcgaaattctttgtgatcaaaatcacaaacaaacaacaaaaacacgaaacaaaaatgtgacaaatatcacacaaaaaggcagatcagcggctaaaaaggcgctgtgttgtttttttacacagtaattttgtgatcatcatcactacaaaaccctcttagccccctatattcatgtgatccaaatcacataaaagggcgctggctggacagctaaacgtttcagtgccagatttcgcactatcaatcagggcccggctacctctgccgccacattaacaacaaacctcgggctttaagcctgcgcgctacgcaaaacagaagaaggggtgttttatgtcatccgatatcaagatcaaagtgcaaagctttggtcgtttcctcagcaatatggtgatgccgaatatcggcgcgtttatcgcgtggggtatcatcaccgcgcttttcattccgacagggtggttgccaaacgaaacgctggcgaagctggtcggtccgatgatcacctacctgctgccgctgctgatcggttacaccggcggtaaattagtcggcggcgaacgtggcggcgtggtcggggcgatcaccaccatgggcgttatcgtcggcgcggatatgccgatgttcctcggctccatgattgccggcccgctgggcggctactgcatcaagaaattcgataactgggtagacggtaagatcaaatccggttttgaaatgctggtgaataacttctccgccggcatcatcgggatgatcctcgccattctggccttcctcggcatcggcccggcggtcgaagttctgtcgaaaattctggcggctggcgttaactttatggtggcgcacgacatgctgccgctggcgtctatcttcgtcgaaccggcaaaaatcctgttccttaacaacgccatcaaccacggtatcttctcgccgctgggtattcagcagtcccacgagctgggtaaatccatcttcttcctgattgaagctaacccgggtccagggatgggcgttctgctggcgtacatgttctttggccgcggcagcgcaaaacagtctgcaggcggggcggctatcatccacttcctgggtggtatccatgaaatctacttcccgtacgtactgatgaacccgcgcctgatcctggccgttatcctcggcgggatgaccggtgtcttcaccctgactatcctcaatggcggtctggtttccccggcttccccgggttccattctggcggtactggcgatgacgccgaaaggcgcctacttcgctaacatcgccgcgattatcgcagcgatggcggtctccttcgtggtctctgcggttctgctcaagaccagcaaagtcaaagaagaagacgatatcgaagccgcaacgcgtcgtatgcatgacatgaaagcggaatccaaaggcgccagcccgctggcggccggcaatgtcaccaacgacctgagccatgtgcgtaaaatcatcgtcgcctgcgacgccgggatgggttccagcgccatgggcgccggggtactgcgcaagaaagtgcaggatgccgggctgagcaacatctcggtcaccaacagcgcaatcaataacctgccgccggatgttgacctggtcatcacccaccgcgaccttaccgagcgcgccatgcgccaggtaccgcaggcgcagcatatttcgctgaccaacttcctcgacagcggtctgtacaccagcctgaccgagcgcctggtcgcggcccagcgccacatcgacaacgaagtcaaagtcaccgatagcctgaaagacagctttgacgatactaacaacaacctgttccagctgggcgcggataacatcttcctcggtcgcaaagcagccaccaaagaagaagccattcgcttcgccggtgagcagctggtgaaaggcggctacgtcgagccggaatatgtgcaggcgatgctggaccgcgaaaaactgacctcgacctatctcggcgagtccatcgcggtaccgcacggcaccatcgaagcgaaggaccgcgtgctgaaaaccggcgtcgtcttctgccagtacccggaaggcgtgcgcttcggtgaagaagaagatgaagtcgcgcgtctggtcatcggcatcgccgctcgtaataacgagcacattcaggttatcaccagtctgactaacgccctggatgacgaaaccgtgattgagcgcctggcgaaaaccaccagcgtcgacgaagttctggcgctgttaaataaataatcaacgctatccaaccctctcctttgggagagggttggggtgaggggaaaggcctcaccccagccctctcaggtgaaaacattaattgaaggttaatactatgaaagcattacattttggcgcaggtaatatcggacgtggctttatcggtaaattgctggccgacgcgggcatcgaactgacgtttgccgatgtcaatcagaccgtacttgatgccctgaatgcccgtcatagctatcaggttcacgtcgtcggtgagaatgagcaggtggacaccgtctccggcgtcaatgccgtcagcagcatcggcgatgaggttgtggacctgatcgctgaggtggatctggtcaccaccgccgtcggtcccgtcgtgctcgagcgcatcgcgccagcgatcgccaaagggctggcgcagcgcaaagcgcagggcaccgaacgcccgctgaacatcatcgcctgcgaaaatatggtgcgcggcaccacgcagttaaaaggccacgtgtttaacgcgctggcggaagaagataaagcgtgggtggaagcgcatatcggctttgtcgactctgccgttgaccgtattgtgccgccatcggcttccgccactcatgacccgctggaagtcaccgtggaaacctttagcgaatggattgtcgataagactcagttcaagggcgcgctgccgactatcccggggatggaattaactgataacctgatggcatttgtcgaacgcaagctcttcaccttgaacaccgggcatgctataaccgcctacctcggaaaactggcgggccatcagacgattcgcgacgcgatcctcgacaagaaaattcgtgccgtcgtgcagggcgcgatggaagagagcggcgcggtgctgatcaaacgttacgcctttgacccgcagaagcacgcggcttatatccagaaaatacttggccgtttcgagaacccgtacctgaaagacgatgttgagcgcgttggccgtcagccgctgcgcaaactgagcgctggcgaccgtttaattaagccgctgctgggtacactggaatacggtctgccgcaccgcaacctggtgaaagggattgcggcggcgatgcatttccgtagcgaagacgatccgcaggcgcaggagctggcggcactgatcgccgacaaggggccgcaggccgcgctggcgcagatttccggcctggatgccgcaagtgatgtcgtcgcggaggccgttaacgactacaacgcggaaaaatgatgcacaacctggcgcggccgacgtcgcgcccattacgactcctgtcagatatgcaggcaatgatggaagaaacacaagcatttgaaaaccgtgtgcttgagcgtctgaatgctggcaaaaccgtacgaagcttcctgatcgccaccgtcgagctgttaacggaagcggtcaatattctggtgcttcaggtgttccgtaaagacgactacgcggtgaaatacgccgtcgagcccttgctggagggcagcgggccgctcggcgatctctctgtacgcctgaagctgatttatggccttggggtgataagtcgtgccgaatatgaagacgctgagctgctgatggccctgcgcgaagagcttaaccacgacggcaatgagtacagctttaccgacgacgaaattatcggtccgttcggcgagctgcactgcgtcgccgccctgccgccaacgccgcaatttgatgacagcgatgccgaactgctggcaatgcagaaactgcgttaccagcagatggtgcgctcaacgatggtgctgtccctgactgagctgatttcacgaatcagcttaaaaaaagcctttcagaaatcaacgctctgattccggttccgtctggtcgcaggtcggccggtaaagctgacgataatattccagacgctgcaggaacaacgcttccttatcctgaggaatgtctcgcggtacatgctgcagacgcggagactttttcaaatactccataaacgcctgactggaagccataaaatcaaccgctttgtcgattaaacgtggtacgccgtcgccgatctttgccatcacgtcctccttttgggaataatctgattaagcattagccaattcaccagcgtgggttaaggaaaacgtgcttatctgccgacaggcttcacagaaatgaaattagaacgggtattaggcggaatattaataaaattcaaattattagcgataaatgatattgcattccgcgggcgacaaacggcgaatttttgataaatagctatcaacaatagcggtcacggcacatactataggcgaatgaagcccctttattaacagatcaaaccaccatgaaagaagtcgaaaagaatgaaatcaagcgtctgagcgatcgtctcgacgccatccgccaccagcaggccgagctgtcgctggtggaagccgccgataaatatgctgaactggaaaaagaaaaagccactctggaaacggagattgaacgtctgcgttccgtccagagccagaagctgagcaaagaggcgcagaagctgatgagcctgccgttccgccgcgcgattaccaaaaaagagcaggccgatatgggcaagctgaagaaaagcgttcgcggcctggtggttgtccatccgatgaccgccctgggccgggaaatgggtctgaaagagatgaccggtttcgcccgcagcgaattttgatacccagccctctccgtacggagagggctattctgtcttcactcccccacatttttaccttcagccgggtcgattggtccaaccaataatttcatccaccccctggcagttcacaaatccgtcaaaacccatcacaaacacgttgcttaagagtaacatctgattaaccattcattgtcatcaaccctgatacccttaattggacgggccaattttactttcggtgggatcggcaatgagcgcagactcagccctcctctcctggcggcccgatggagaccctgcatgaatctctggcaacaaaactacgatcccgccggtaatatctggctatccagtcttatcgcatcgctaccgattctgtttttcttttttgcgctgattaagctcaaactgaaaggctacatcgctgccacctggaccgtcgcaatcgcgctggtcgttgccttgctgttctataaaatgccggtggaccgcgccttagcctcggtggtctacggcttcttctacggcctgtggcctatcgcgtggattattatcgccgcggtcttcgtctataaaatctcggtgaagaccggacagttcgacatcatccgctcatcgattctgtcgattacgccggaccagcgcctgcagatgctgatcgtcggcttctcgttcggcgcctttctcgaaggggcggcgggtttcggcgcaccggtggcgattaccgccgcgctgctggttggtctcgggtttaatccgctgtatgcggctggcctgtgcctgatcgtcaacaccgcgccggtggccttcggtgcgatgggcatcccgattctggtcgccggccaggtgaccggtatcgatagcttcgccatcggccagatggtgggccgccagctgccgttcctgaccattatcgtgctgttctggatcatggcgattatggacggctggcgcggcattaaagagacctggccggcggtgatagtcgcaggcggttcgttcgctattgcccagtacctcagctcgaacttccttggcccggagctgccggatatcatctcgtcgctggtctccctggtctgtctgaccctgttcctcaaacgctggcagccggtacgcatcttccgcttcggcgatctcggcgcctcgcaggtggatatgacgctggcccgcacacgctacacggcgggacaagtgatccgcgcctggtcgccgttcctgttcctgaccgccaccgtgaccctgtggagcgtgccgccattcaaagcgctgttcgctcctggcggcgcgatgtatgacttcgttatcaatatttcggtaccattcctcgacaaaatggttgcccgtatgccgccggtggttagcgccgcaacgccctacgccgcggtatataaattcgactggctgtcggcaaccggcaccgccattctgttcgccgccctgctgtccatcgtctggctgcgcatgaagccgaaagatgcgctgaccaccttcgccgggacgctgaaggatctggcgctgccgatctactctatcggcatggtgctggcgttcgcctttatctctaactattccgggctgtcgtcgaccctggccctggcgctggcccataccggccacgcgtttaccttcttctcgccgttccttggctggctgggggtattcctgaccggttcggacacctcgtctaacgccctgttcgccgcgctacaggcaacggcggcgcagcagattggcgtctccgatattctgctggtcgcggccaataccaccggcggcgttaccggcaagatgatttccccgcagtcgatcgccatcgcctgcgccgcggtaggcctggtgggcaaagagtcggatctgttccgctttaccgtcaaacacagcctgatcttcacctgcatggtggggctgatcaccacgctgcaggcctacgttttaacctggatgatcccgtgatagtgatgcctaaacgcctggccgacgacgtggcgcgtcgcgtccgggcgctgattgaagaacaacagctggaggcgggcatgcgactgcccgccgagcgccagctcgccgcccagctcggcgtctcacgcaattccctgcgcgaagcgctggcgatgctggtcaatgaaggggtgctgttgagccgtcgcggcggcggcaccttcgtccgttttcagcatgagccgtggtcagagcaaaacatcgtccagccgctgaagacgctgctggccgatgacccggactacagcttcgatatcctcgaagcccgccacgccatcgaagccagcaccgcgtggcacgcggcgatgcgcgccaccgacgccgataaagaaaaaattcgtctgtgctttgaagcgacccagagtgaagacccggatatcgcctcgcaggcggatgtccgctttcacctggcgatcgccgaagcctcgcataacgtggtgctcctgcaaaccatgcgcggctttttcgacctgctgcactcctccgttaagcagagccgccagcgcatgtatcaggtgccgccggtgtttgcccgcctgaccgaacagcaccaggccgtcatggaggcgattgtcgccggcgacgccgaggcggcgcgccaggcgatgatgggccacttaggctttgtccacgccaccatcaaacgttttgatgaagaccaggcccgccaggcgcgaattacccgcctgcccggtgaccacaatgaaaattccagggagaactcgtgatgattatttccgccgccagcgactatcgcgccgccgcacagcgtatcctgccgccgtttctgttccactatattgacggcggcgcctacgccgaacataccctgcgccgcaacgtcgaggacctttccgatgtagccttgcgccagcgtattttgcgcaatatgtcggacctgagtctggaaacgacattattcaacgagaagctggcgatgccgacggcgttggcgccggtcgggctgtgcgggatgtacgcccgccgcggcgaagtgcaggccgccggcgcggcggacgacaaaggcattccgttcaccctctctaccgtttccgtctgcccgatcgaagaggtcgccccgaccatcaagcgcccgatgtggttccagctgtatgtcctgcgcgaccgcggctttatgcgcaatgcgctggagcgcgccaaagccgccggctgctcgacgctggtctttaccgtcgatatgccgactcccggcgcccgctaccgcgacgcccattccggcatgagcggcccgaacgccgccctgcgccgctactggcaggccgtcacccatccgcagtgggcgtgggacgtcggccttaacggtcgcccgcacgatctgggcaatatctccgcctatctcggcaaaccgaccgggcttgaggattacatcggctggctggcgaataacttcgatccgtcgatttcatggaaagacctggagtggatccgcgatttctgggacggtccgatggtgatcaaagggatcctcgatccggaggacgcccgcgacgcggtgcgcttcggcgctgacggcattgtcgtctccaaccacggcggccgccagctcgatggcgtgctctcctcggcccgcgccctgccggcaattgccgacgcggtgaaaggcgacatcactattctcgccgacagcggcatccgtaacgggctcgacgtggtgcggatgatcgccctgggcgccgacagcgtgctactgggccgcgcttacctgtacgccctggcgacccacggtaagcagggcgtggcgaatctgctgaacctcatcgagaaagagatgaaagtggcgatgaccctcaccggggcgaaaagcatccgtgaaatcagccgtgattcgctggtgcagaacgccgaagcgctgcagaccttcgatgcgctgaagcagaataacgccgcgtaattctccacgttttcccttacgccgcccctctccctcagggtgagggttcaacaaatatctgctattctgccccccgcaattaaggggcagtatgctgaacatcgtgttattcgaaccagagatcccgccgaacaccgggaatattatccgcctgtgcgccaacacgggcttcagtctgcatatcattgagccgatgggcttcacctgggacgataaacgcctgagacgcgccggactggactatcacgagttcactgccgtgcagcgctatgcggattacgcggcgtttgtcgccagcgcgcagccgcaacggttgttcgccctcacgactaaaggcacgcccgcccacagcgcggtaagctatcaggacggtgatttcttgatgtttggtccggaaacgcgcggcctgccggccagcatcctcgatgccctgccgccggagcaaaaaatccgtattccgatgatgccggacagccgcagcatgaacctgtcaaacgcggtgtcggtggtggtgtatgaagcctggcgccagctggggtatcctggcgcggtcttgcgcagctaacctgagcggttcccggattacggcgcgttgcgccttatccgggctacatttctgtgcttagcagcggcaaatggcaatacatcaaatcccgtcgccgtactcgaaggtgtggtggatgccgttgaaatgctgatccatatccatcgccggcttgtcgctctccggcttgccgacgatacgcgccggtacgcccgccgcggtggtgtgcggcggaaccggctgcaataccaccgaaccggcgccaatcttcgcgccacgcccgacttcaatattgccgaggatcttcgccccggcgccaatcatcacgccttcgcgaattttcggatgacggtcgccgctggttttaccggtcccgccgagggtgaccgactgcagaatagagacgtcatcttcaatcaccgccgtttcgccgaccacaatgccggtggcatggtcgagcatgatcccgcggccgattttcgccgccgggtggatatccacctggaaagagacggagacttgattttgcaggaaaatcgccagcgcgcgtcgcccctgagtccacagccagtggccgatacgataggcctgcagggcatggaaacccttcagatagagcaacggcgtggagtatttatccaccgccgggtcgcgcgtgcgcaccgcctgaatatcgcaggcggcggaggcgatcatttccggatcggcggcgtaggcctcttccaccacttcgcgaatggcgatcgccggcataatcggggaagccagcttgttggccagcatatagctcagcgcgctgccgagattttcatgcttgagtagcgttgcgtggtaaaaactggcgagcatcggctcacagtcagccaaagcccgggcttcggctttaatattattccagacgatatccagttcttcacacggcattgcatactccaggcgatatagtaatgacctgccagttctgcgctggcagggtcattcaggtgacaaaggaaagctaattgctactgcgctcgtccttgcgggcgcgacccaataaggtcaatgctgcctcgcgcgcaatttttccgcaatacaatacctgataaatttcctcggttattggcatttcgacacctaaacgctgtgccagaacgcgaacttccttggtattgcggtagccttcaaccacctggccaatcttgtcctgggcactctgcacgtccataccctggccgagcatcatgccgaagcgacggttacgggactggttgtcggtgcaggtgagcaccaggtcaccgaggccggccatgcccataaaggtttccggatcggcgcccagcgccgcgccgaggcgggacatttccaccagcccacgggtaatcagcgccgtacgcgcattggcgccgaagccgatgccatccgacatacctgccccgatggcaatgacgtttttcaccgcgccgccgagctgcacgccgataaagtccgggttgatgtagacgcggaagcttttgccgcagtgcagtaggcgctgaaggtcttccgcaaactgcggatccgtggccgccagcgaaatcgccgtcggcaggccggcggccagctctttggcgaaggttggccccgagatcaccgccagcggaatatcatcgcccagcgcttcacgcgccacgtcctgcagcagacggccggtttcggcctccaggcctttggtggcccacactagccgcgcgtcggaacgcatcagcggtttaatctggcgtaacacctgaccgaatacatggctcggcaccacgacaaggatgtcgcggctggcggccagcgcggtggccaggtcgctctcaagatgcagcgtatccgggaaaggcacatcgggaaggaacgcggcgttgcagcgatcgtgttgcagcgtcgcgatatgtttcgggtcatggccccacagcacaacgtggtggccatttcttgccagggtgatggcaagagcggtgccgtaagagccggcaccgatcacagtcattgcagcattaagtgcgttcatcaggcatcctgatgttgttcagcaccttcgccagcctgctgctgcagatagttcatgaacagcgcgtcgaagttcactggcgcaaggttaagttgcgggaaggtaccgcgggaaaccaggctggtgatgcactcgcgcgcgtacgggaacagaatgttcgggcagtatgcgccgaggcagtgcgccatctgggtgccttcgatgccgtcgatggagaaaataccgccctgctgtacttcacagaggaacgcggtttcttcgcccagcgcagcggtcacggtcacacgcagcaccacttcataaacgccttcagccagctgggtggaggcggtatccagatcaagtttaacttccggctgccagtctttctggaaaacttgcggcgcgttcggcgcttcaaaagagatatctttggtatagatacgctggatctggaaggtcatttcggtgctgttttgttctgacatagtaaaaccctttcgtgttgtccttaaatacgcgcttccgccagggaaagcgcgcaaaaattagcgcaagaggggatcaagtccaccacgtgaatcaagcgcatacaagtcgtcacagccgccaatgtgctgcgcatcaataaaaatctgcggaaccgtcgtccgtccgctgcgctggatcatctcctcacgcttcgcggcatcgccatcgatcggcaactcatggaacgttacgcctttgctgttcagcagcgctttcgcgcggatgcagaacgggcaggtcgctttggtgtagatctcaatattggccatgacttcactcctgttgttaccctgagggttttacgccgcagcctgtgttcccttcacgtcaggcgtgaaggagaaaacgcggcggcatcaccacgcgaggtaagttatttgccgcgtaccagagggaggttttcgccgctccagccagcaatgccctctttcagtacaaagactttttcaaacccggctttgttcagcgcgctggcgggctcttgcgcctgcatgccggaaccgtctaccacaataatgggttgcgatttgtgtttttccaactcgccgacgttattggctttgatatcgctgggcagcaggttaatagcgccggcaatatggcctttacggaaatcgtcacgctgacgcaggtcgaccaccaccgcatcttctttattgataagacgcgtcgcttcaccacgggtgatgactttaactttcgacatcagccccttgaaggtggtgaacactaccgcacccagcagcgcgatccacgcgatgctcaggaccgggtgacggccgatgaattgcataatttcttgcatggggggttacaactcccgactaagtgagaaaaaaaccaggaaaggagtatacctgtgccttgcggcaattacagccagtgagcgcgatgtaatgtattttctgcgggcggtggcgaaaaaaagccgctctcgctgacccggcgcggcccggccgctccctttctttgatctttcacggggatttaaacgattcagctgtagtaaaattacgcaaaatttctgtctttgagcatgaggttgtcgcaatgtcggtttctaaaaaacctatggtactggtgattctggatggctacggctatcgcgaagaccaacaggataacgccatttatagcgctaaaacgccggtaatggacgcgctgtgggccaaacgtccacataccctgatcgatgcatccggcctcgaagtcggcctgccggaccgtcagatggggaactccgaagtaggccacgtcaacctgggcgccggtcgtatcgtctatcaggacctgacccgtctcgatgtggaaattaaagaacgcaccttcttcgccaacccggtactgaccgccgcggtcgataaagcggttgccgccggcaaagcagtacatatcatgggcctgatgtcgccaggcggcgtccacagccacgaagatcacatcatggcgatggtggagctggcggcagagcgcggcgctgagaagatctacctgcacgccttcctcgacggccgtgatacgccgccgcgcagtgcggaaaaaacgctggcgacattcgaagccaaatttgccgcgctgggcaaaggtcgcatcgcgtcgctcatcggccgctattacgccatggaccgcgacaaccgctgggatcgcgtggaacaagcttatgatctgctgaccctggccaaaggcgaattccaggccgataccgccgtcgcgggtctgcaggccgcctacgcccgtgacgaaaacgacgaattcgtgaaagccaccgttatccgcgccgccggccaggccgatgccgcgatggaagacggcgacgcgctgatcttcatgaacttccgtgccgaccgcgcgcgtgaaatcacccgcgccttcgtcaacgccgacttcgacggctttgcgcgtaagaaagtggttaatctcgatttcgtgatgctcaccgaatacgccgccgacatcaaagtcgcctgcgcctacccgcccgcctcgctggccaataccttcggcgagtggatggcgaagcacgataaaacccagctgcgcatctccgaaactgaaaaatacgctcacgtcaccttcttcttcaacggcggcgtagaagagccgtttaaaggcgaagagcggatcctgattaactcgccgaaagtggcgacctacgatctgcagccggaaatgagctccgccgagctgactgagaaactggtcgacgccatcaaaggcggaaaatacgacaccatcatctgtaactacccgaacggcgatatggttggccataccggggtgatggaagcagccgtaaaagcggttgaagcgctggatcgctgcatcgaccaggtggctcaggcggtggaatccgttggcggccagctgctgatcaccgccgaccacggcaacgccgagcagatgcgcgacccggccaccggccaggcgcacaccgcccataccaatctgccggttccgctgatctacgtcggtaataaagcggtcaaagcggtcaacggcggcaaactttccgacatcgccccgaccatgctgtcgctgatgggaatggaaatcccgcaagagatgactggcaagccgctgttcatcgtggaataatccttccccatgaggggaaaggcgatgtattcaactacatggatcgcagcggcagttcgatccgtcctttacgccagcgcgctcagcgctggcgtattgctgtgcgcgtcatctgcgcatgccgacgatcgcgatcagctaaagtccatccaggccgacatcgccgccaggcagcgggcgattaagcaacagcagcagcagcgcgcaagcctgctcgcccagctcaaagcgcaggaagaggcgatcgccgccgcggcccgcaaactgcgcgaaacccaggatagcctgaaccagctcaataagcagattgacgagatgaacgccgctctcgcgaagctggagcgccagcgcgcgtctcaggagcggaacctcgccgcgcagctcgatgccgctttccgccaggggccgcataccggcatccagatggtgctcagcggtgaagagggccagcgcaatcagcggatgcaggtctatttcagctatttcaaccaggcccgccaggagactatcgcggagttgaagaaaacgcgcgaagagatggcggtgcaaaagtcgatgctcgaagaaaaacagagccagcagcaaacgctggtctacgagcaaaaggcccagcaggcgaagctggagcaggcgcgtaacgaacggaaaaagaccctttccggcctggagtcttccattcagcagggtcagcaacaattaagtgaattacgggctaacgaatcgcgcctacgcggtcgtatcgcccaggcggaagctgccgccaaagcccgcgccgatcgggaagcacgcgacgcgcaggcggtgcgcgaccgccagcaggaagcatcgcgcaaaggcaccacctataaaccaacggaaagtgagcgttcgctgatgtcacgcaccggcgggctgggctcgccgcgcggtcaggcgttctggccggttcgcggtccgctccttcatcgatatggcgaacagctgcaaggtgaactacgttggaaagggatggttatcgccgcgtctgaaggcaccgaagtcagagccattgccgatggtcgggtcattctggccgactggctgcagggctatggtctggtggtggtggtcgaacatggcaaaggcgacatgagcctgtatggctataaccaaagcgcgctggtcagcgttggtacccaggtgcgtgccggccagcctatcgcgctcgtaggcagcagcggcggtcagggccgtccgtcgctctatttcgaaattcgccgccagggtcaggcggtcaatccacagccgtggttgggaagataagttttgcttcaatttcgcgcaattgctcttgccgtagccggttcgctggctctggcggcgccagcgttcgctggcaaactctccatcgttattgacgattttggctaccgcccgcagaccgagaatcaggtgctggcgctgccggcaactatctccgtcgccgtgctgccgaacgcgccgcacgcccgggaaatggccactaaagcgcataatcagggccatgaagtgctcatccacctgccaatggcgccgctcagcaaacagccgctggaaaaagacaccctgcgtcccgaaatgagcagcgaggagatcgagcgcattattcgcgaggcttacggcaaagtcccttacgccgtcgggctgaataaccatatgggcagcgcgatgacctccaacctgtttggcatgcagaaggtgatgcaggccctggagcgctacaatctctattttctcgacagcgtcaccatcggcaacacccaggccatgcgcgccgcgcagggtaccggcgtgaaggtgattaagcgcaaggtgtttctcgacgatacgcagaatgaagccgatatccgcaaccagttcaatcgcgccatcgccctggcgcggcgcaacggttcggcgatagccattggccatccgcatccgacgacggtgcgggtgctgcagcagacggtctataacctgccgccggatatcacgctggtgcgcccgagcagcctgctgaacgagccgcaggtcgacaactcgacgccaaactacgcccagccgcccgcgcaacaaacgcagcagaagccgcgtaatccgttccatggcgtgaagtcttgcaaaccgaagcgcccgctggagcctgtgaacgccagccgcttcttcactatcctcagcgatagcatcagccagagcgcgctgatccagtactatcgcctcaaatggcagggctgggacaaccccggcaactagaccactcaggggtccgttcgcttttgcgcgacgggcgcctggttatcttcgtgggcgtaccacgccttaaaatatttcagaaagctgtaaaacgtcgcgtacaggccggtcaccacgccgaccttgccatagcgccacgccccgctaaacagataccacttaaagaaagcgccaatggcgctgacgatcccccgcgtcagcgaaggtttgatctgctggtacttcaccagccgggtggtatagctgttcagcttattaaacacttcatgcagcgaataaaaggtatcgtggcgaacgaagcccggcagcctgacggagctcgcgtgtccgaccacctggtcatccaccggccgatcgttaaaccgcgcctgctggcggttaaagaggcgcaccggataatccggtgaggaaatggggtagatagtccgtacctgtttgcctagcacaaaccagtagcgcggcagacgccaggcgcaggtcgggtcaggctcctcccccgcttttagcgcctgaatggccgtcaccacgtcattatcaagaatttcgtcgctgtccatgcacagcacccagtcatggctggccagcccgatggcatagttcatttgcgcgccgtgggctttataggcatggtgatggacggtgagaccaaactgctggcaaatagcgacggtttcgtcggtactgccggagtcgacgacgatacattcatcggccaccttcagcagaggcggcagcacctccatcagcaggcgcgcagagttacaggtcagtaagcatacggagagtttaagcatgatagttacaaagttaaactgcgactaaacacactgtataagcgaataaccgtaaaatcgatgtagaaattgtgcgcttaatattaagcaggctaaaaatgttatccaaatctaaattaaggcgcccgcaggcgccttttttgctgatttttacgccagcatgggggattagtcccagctcaaaaccactttaccggactggccggagcgcatcgcgtcaaaacctttctggaagtcatcaatgccgaagcggtgggtgatgatcggtgagagatccagaccagactggatcagcgccgccatcttgtaccaggtttcgaacatttcgcgaccatagatacctttgataaacagccctttgaagatgaccttggtccagtcgatggacatatccgacggcgggatacccagcatcgcgatacggccgccgtggttcatggtatccagcatgctgcgaaaagccggcggcgcgccggacatctccagacccacatcgaaaccttcggtcatccccagctcggccatcacgtcattaaggttctctttggccacgttcaccgcgcgggtaacgcccattttgcgcgccagctcaagacggtactcgttgacgtcggtgatcaccacgttacgcgcgccgacgtgtttcgctaccgccgccgccatcacgccaatcggaccggcgccggaaaccagcacgtcttccccgaccagatcgaaggagagcgcggtgtgcaccgcgttgccgaacgggtcgaagatagacgccaggtcatcagagatattgtcggggattttaaaggcgttaaaggccgggatcaccagatactcagcaaagcagcccgggcggttgacgcccacgccgatggtgttgcggcacagatgggtgcggcccgcgcggcagttacggcagtggccgcaggtgatatgcccctcgccggagacgcggtcgccaatcttaaaaccacgcacttcctgaccaatccccaccacttcgccgacatattcgtgaccgaccaccatcggcaccggaatggtcttctgcgaccactcatcccagttgtagatgtgcacgtcggtcccgcaaatggcggtcttgcggattttaatcagcagatcgttatggccgacttccggttccggtacgtcggtcatccagatgccttcttccgctttcagtttggataacgctttcatctcatacccttattaggcgatgacgcccagttgtttgccgatgcgggtaaaggcttccaccgcacgctcaatttgttcaggggtatgcgccgccgacatctgggtgcgaatacgcgcctggcctttcggtaccaccggatagaagaagccggtgacatagatcccttctttctgcagctcgcgggcaaagttctgcgccaccaccgcctcacccagcatcaccggaatgatggcgtggtcggcgccggccagcgtgaagcctgccgcggtcattttttcgcggaacagacgcgcgttagcccacaggcgatcgcgcaggtctgccccctcttcaaccatctccagcactttgatggaggcggccacgatggccggcgccagagagttggagaacagatacggacgggagcgctggcgcagccactcaaccacctctttgcgcgcggcggtgtagccgccggaggcgccgcccagcgctttacccaacgtgccggtgatgatatcgacgcgccccatcacatcgcagtattcgtgggagccgcggccgttttcgccgacgaagccgacggcgtgggagtcatcgaccatcaccagcgcatcgtatttatccgccaggtcgcaaacgccttgcaggttggcgatcacgccatccatcgagaacacgccgtcggtggcgatcagcacgtgacgcgcgccggcctcgcgagcttctttcagacgcgcctccagctcttgcatatcgttgttggcatagcggaagcgcttcgctttacacagacgcacgccgtcgatgatcgaggcatggttcagggcgtcggagataatggcgtcttccgggccgagcagcgtttcaaacaggccgccgttggcgtcgaaacaggaggagtagaggatcgcgtcttccataccgaggaaatcggccagcttcttctccagctgcttatgcgtatcctgggtgccgcagatgaagcgtaccgaggccatcccgaaaccgtggctgtccatgccggatttcgccgcggcaatcagttccgggtggttcgccagacccagatagttattggcgcagaagttaatcacgtggctgtcgccgacggtaatgtccgcctgctgcgccgaggtgatgatgcgctcttctttgaacaacccttcggcccgagcggtctccagattgctagttaactgtttgtagaaatcaccacgcattgcaactctccagattcggcaaaatttggcacatattacccaaagctatacgctgatacgagatgatgcaggcctgaatgaattatttgcagcataaatcacgtcagcccagcaccttattctgcgaatggctgtaggcttgctcatgtggtgatatgataagagcattcatgtccggattgtctccgggctctcaacttcaaaggtacagttatgatcatcgttaccggcggcgcaggctttatcggcagcaacatcgttaaagcgctgaatgacaaaggcatcaccgacattctggttgtcgacaatctgaaagacggcaccaagtttgtaaacctggttgacctgaacatcgctgactacatggataaagaagactttctgatccagattatggcgggtgaagagttcggtgaaatcgaagcaatcttccacgaaggcgcgtgctcttccactaccgagtgggatggcaagtacatgatggacaacaactatcagtactccaaagagctgctgcactactgcctggagcgcgaaatcccgttcctgtacgcctcctccgcggccacctatggcggacgcaccagcgacttcatcgagtcccgcgagtacgaacagccgctgaacgtttacggctactccaaattcctgttcgacgaatacgtccgccagatcctgccggaagccaattcgcagatcgtcggcttccgctacttcaacgtctacgggccgcgcgaaggccacaaaggcagcatggcgagcgtcgctttccacctcaatacccagctgaataatggcgaaagcccgaaactgttcgaaggcagcgacggcttcaagcgcgacttcgtctacgtgggcgacgtggctgacgtcaacctgtggttctgggaaaacggcgtttccggcatctttaacctcggcaccggccgtgcggaatccttccaggccgtcgccgatgcgaccctggcataccacaaaaaaggcagcatcgagtacatcccgttcccggacaaactgaaaggccgctaccaggcgttcactcaggcggatctgactaacctgcgcaaagcgggctatgacaaaccgttcaaaaccgttgccgaaggcgtaacggaatatatggcctggctaaaccgcgacgcgtaagaaacaagcatgaaaatattggtggtaggcccgtcttgggtgggcgacatgatgatgtcgcaaagtctttatcgtacgctcagggcgcgctatccccaggcgattatcgacgtgatggcgccagcctggtgccgtccgttgctttcgcgcatgccggaagtgaacgaagcgatcccgatgccgctgggtcacggcgcgctggctatcggcgaacgccgtaagctcggccacagcctgcgcgaacgtcgctacgatcgcgcttacgtgctgccgaactcgtttaaatcggcattagtccctttctttgccaatatcccgctgcgcaccggctggcgcggcgagatgcgctacggactgctcaacgacgcccgggtactggacaaagacgcctggccgctgatggtggaacgctacgtggcgctggcctacgacaacggcgtgatgcgctgcgccaaagatctgccgcagccgctgctgtggccgcagctgcaggtcaacgaaggggaaaagtcgcaggcctgcagcgcctttaacctgtccaacgatcggccgatcgtcggcttctgccccggcgcggagttcggcccggccaaacgctggccgcactatcattatgctgcgctggcgaaaaagcttatcgacgatggctatcagattgcgcttttcggctcggcgaaagataacgaggccggcaaagagatcatcgccgccctcagcagcgagcagcaggcctggtgctgtaatctggcgggtgaaacccagctggagcaggcggtcattctgatcgccgcctgtaaagctgtagtgactaacgattcggggctgatgcacgtcgccgcagcgctggaccgcccgctggtggcgctgtatggcccgagcagtccggactttaccccgccgctgtcgcataaagcgcgggttatccgtctgattaccggctaccacaaggtgcgcaaaggcgatgccgccgaaggctatcatcagagcctgatcgacatcaccccagaacgcgtcctgcaagagctgaacgaactgttagcggaaaaaaccgagcacgaggaagcgtaacggatgcgggtattgatcgttaaaacctcctccatgggcgacgtgctgcacacgctgcccgcgctaaccgacgccgcgcaggctatccccggcatccgcttcgactgggtggttgaagagggtttcgcgcagatcccctcctggcataaaagcgtcgagcgggtgatcccggtggcgatccgccgctggcgcaaagcctggttctccgcgccgatcaaagccgagcgtcaaacctttcgcgaggccgttcaggcggtaaagtatgacgccatcatcgacgcccaggggctggtgaaaagcgccgcgctggttactcgcctggcgcacggcgtcaagcacggtatggactggcaaacggcccgcgagccgctggcgagcctgttttacaaccgccgccaccatatcgcgaaacagcagcacgcggtggagcgtacccgtgagctgttcgccaaaagccttggctacgcgaaaccccagacccagggggattacgccattgcgcgccatttcctgcagcacgaggctagcgctgccgcgccctatctggtgtttctgcacgctaccacccgcgacgataagcactggccggaaacccgctggcaggagcttctcgatctgctggccgacagcggcgtccacattaagctgccgtggggggccccgcacgaagaggcgcgggcgaagcggctggcggaaggccgggagtatgttgaagtgctgccgcgcatgagccttgagcaggtggcgcaggttctggccggcgcccgggccgtcgtctcggtcgataccgggctgagccatctgaccgccgcgctggataaaccgaactttacgctctacggcccgaccgacccggggctgattggcggatacggtaaaaaccagcatatcgtgcggccggaaaacagcgccagcaccggcgatattgcggccagccggattcatcttctcctgcaaaatcaggggctgctctgatgggatccctgtttaagcagatctaccgctatacgcgccctcgcgcgtatcgccacaatgaaaatctgtggccttttacccgtattgcgcgtgcgccaagcggcgaaatcagcgcgttacgctataaagggaaaacggtgccgctggtcagcctgagcgcgctgaaaaacagtatgcagggcgaagtcctgctgaccgccaccggcccctcaacccgcaatatcgatttttccctgttgtcgaaaacgatcccggtgatgggcgtcaatggcgcctggcatcttgccgaccggctgcacttttcgctctataccatcgtcgacatggaatttttcgataagaagccggacattatccgcgccattgtcagccagccggatattttgctgttcaccaccatgcacgggatcgccaaaatcgtcgatcgctatggggacgcgctgcgctgccgtttggcgttgattgaggacggttgctataagatttaccagccgaaagtcgccagcgaagcgataaagcgcacttaccagcagaatgcggcgatgtgctttcatcctcagcgcccggatatctgttttagcaccgatattcgccagggcatctttgatgccggcacggtggtctactgggcgctgcaaattctcgcctggctgggcttcaatactatcctggtgagcggcctggatatgaccaactttaaccagccgcgattctacgaaacacaacaagaaaaattgccttcttacctggcaacaaaagtggataccctcgtcatgccctcctttgcgcatgccgcgcaggtactgcagcaacgccagattcgggtgattaatttttccccagaaagcgctgtgccggatactatcttcgaaaaggttgcgtttaatgagtactttaaaagtgagtaacttcgccagacagggttactcgattgtctttcctttgtttttatttttcagcgcgattttttgcatgtccacccggaccaataatctgctgcatttatcgatcctgctgctattgctgtcgctggtacgccaggaaaaccgccaggcgctggccggggtgttacgcgagcagtggcagacctggacgctgctggcggctttctttatctattacgccctcagtaatgtgtggggccatacgccgcagcatattgactcgccgatcacccacggcgtgtatctgaccgggtatctgttgctgatgacgatgctgctcagggacggacgaacccgccgactggcgatgctggcggtggtcggtgggatcaccgtgctctccctgtggacgctgattatcgaccatacgctggttctcaccgaacgagcggtctccccgagaaccccggaccaacgaacgttatcgaccttgccggttactgcggcatcggcattttaatctgcggcatgctactgaaagaaaaagccagccactggctctatctgccggtggtcatcatgctggtgatgctgctgctcacccaaagccgcgggccgatcatcgccctggtgctggcggtcggctgtacgctgcacctgcacgtcttcacccgccgcaacctgctgatcgccgcggcgctggccgtgctggtagcgctgcttttggtcatgacgccggtgggcgacatgctgctcgcccgtttcgaggagctgggcacccaaagcgggctgcgcctgagcatctggcaccatacgctgtcggagatggccagccagccgtggctggggcgcggtttcagctatgaactggatttcatcaactacagcggcgagcacatcaccaccacccacagcgtgtatatgggcgccctgctgaaaggcggcatcgtggggttactgctgctgttggcgatcattgcctgcgggctatggcaggcgtggcgcaagcgccataccgacagccgctacagtctggcgatcctgttttacgcgctggtgtttatggcctcgcaggggatgtttatcatcagcaatccccgggaaacctgggtgctgttctggctgccgctgggcattgcgctcagcaaagggttggcggaaaaacgctaacaaaaagggccgtcagcggccctttttatattaactttttaaattaactgcgggcggcgaccagccggtcggcctgctctttaatcacgggccacaccgactcaatcgccacatcggcgacattcgcttcttcacagactatctgcttcgccttgtcatagcccggcgcccagatgtgatagccgggcagcccggtattcttgagtttgcgtttgttatagaccgccaccatcggcttatcgaaagcccgggcaatatgcacgatcgaggtgtccggcgtaatgactaaatcacagctgcggatcacttctacggcggagttgatggtgctgtcggcgatgtacagcgccatatccagccccagctggcggattttttcactgcgccccaccatcacgatacagacccggtaaggcagagcatgtagccgctcgaccagggtcgccacctggtgacgacagaagtctttatcctcggaggcggtaaaagggttaatggcgatacgcagttcgacctctccggcctgagaaagcaagcgggccactttctcccgctcatggcggcagccggggagatgatagtgatacgggcggtcgtcaacgatgccaaacagcttcaccacctgcttatagcgcagggaaatatggctgttgccgtcaaaaaaagcgattgagtgatcgtaaagtttatagggctctttattaaaaccaatcacgctggtcgcccgtaaatcggcgagtaatttaaagcgttcatagctggtcacgtcatcaaaatcgataaccgcatcaaaacccgccgcccgcaacgtatttaaggacatgcggggccgatataaatatacttgctgaatgaattctgagcctgctaatatttcgctgcatattggtccggttaacaccgaaacctgatatccccgttcggccagtattctggcgcagccggtcgtgaccaccatatcaccgactttatcatccagacgcaatagcagcacgcggcgcacagccgctgggtcgaaggctttacgcgccggcttatttctgtatcgatagttaattaaattaaatttaatgccgcggaaaaaagcattctttttccgcgttaattgtttaaggatacgcatacggtaccttgagctgtgttagcgctgtgtaattttccgctggtaatattctgccaacgtcatgcccttcacctgcggcgccagccagctaaaaaaggcttcgaggtcagcgtataaacgctcaatatcccgttcattctggaacgtggggctgccgccgggcatatactctgaagagtggagcatatattccacgtagtcattgccctgcgtcaacgtttgttcgacgacttttttcatcgtctccacattgccgcccatcggtcgcagccagtgtacggagggggaacgcactttgccgcgcaggcggtcgtagccctgcttcacgctgttcatccacgctgagtgcttgtactggatgctcatcggcacttccagcagcggcgagtggccctcgcggctgatgtcattttcatcgaggaaataggcatgctgcggaaagcggcgataatcggtcccgccatcgccctgcggcgcccccttggcggtcttccagttcacccgcggggtcaccgagcaatccacctgatacccgtactctaccagcagacgcgcatagcgctcgtcaaaagcccagcgcccggcgcgatggctaaccattttggtctggaaggtatcctccagcagacgcgtcatatagtcgaccttctcacgcatcatagcgtcgctgtattcaataagataaggcttatggcgccagtcatctgcggtcagcggctcggtcggcgggctgttccacgcatgcagatgcatgccgacttccgcggtgccgcgggcaatcacgtctctggcgaattcgatataaaaggggtcgatggccatttcatagttggtcaaatagaccggtttaaagccatacttttcgcaaagctgctgaaaacgcggaagataacgcgcattctcggtggtgatgctgtcatgtttttgccagaggttatcgccctctgtatcaatcgtgatgagaaatgcgggattgtgcacgaaaacgtcctcaggccatacgtatcgggtcatggtagagcaatacaacgcttctctcaatctgtctgatcccctagaatcggaacccttatcctggatgaagaacagagtatgacgcctgaaaccctctcccgcggcccgttgaacccggcgcggatcctggtcattaagctgcgccatcatggcgacatgctgctgatcacgccgcttattcacgcgctgaaacagcagtaccccgccgccagcgtggatgtcctgttgtatgaagagacccgggatatgctcgcagccaaccccgatatccaccatatttatggtctcgatcgccgctggaaaaagcagggaaaaaggtatcagctgaagatgcaatggcagctcattcagacgctgcgccagcagcggtacgatatggtgcttaacctggccgaccagtggccgagcgcggttatcagcaaactgaccggcgccgcgacgcggattggttttgattttccgaagcgccgccacccggtctggcgctattgccacaccgcgctggcctccacccaacagcacaaccagctgcatacggtacagcagaatctctctattctcgctccgctcggtctccagttgaacgatgcgccggcgcggatgggctacagcgaagcagactgggccgccagccgcgccctgctgccggaggacttccgggaacactacatcgtcatccagccgacgtcgcgctggttctttaaatgctggcgcgaagatcgcatgagcgccctgatcaacgcgctgtccgccgaaggatacgcggtggtgctcacctccggccccgatgctagagagaagaagatggtggataccatcatcgccggctgcccgcaggcgcgactacactctttagccggccagttaacgttgcgccagctggcggcggtgatcgatcatgcccggttgtttatcggcgtcgactcggtgccgatgcatatggctgcagcccttggcactccgctggtcgccctgttcggcccctcgaagctgaccttctggcgtccgtggcaggcgaaaggcgaggtgatctgggccggcgacttcggtccgctgcccgatccggacgctatcaacaccaacaccgacgaacgttatcttgatttaattcctaccgacgccgtgatcgcggcggcgaaaaaggtactagcatgagtaaattcaggctggctctggtgcggcagaagtaccgcccggacggcggcgcagaacggtttgtctcccgcgcgctggaagccctcgacagcagtcatttgcaactgaacgtcatcacccgcgaatggcaggggccggtgaaaccggactggcagatccatatctgtaacccacgtaaatgggggcgcatcagccgcgagcgcggctttgccaacgccgcgcgcgagctctggcagcgcgagtccttcgacctggtgcagagccatgaacgtattcccggctgcgatctctaccgcgctggcgatggcgttcatcgccgctggctgcagcagcgctcgcgcattttaccggcctggaaaagccgcctgctgttcgccgaccgttaccaccgctacgtcatgcaggcggaacgcgagatgtatgaagactcacacctgcgcggggtgatctgcaacgccgagatgatcaagcgcgagattatcgaagactttggcctgccggcggagaagatccacgttatttacaacgccattgacaaccagcgcttcctgccgccagacgaagagacctttgccgccttacgcgccaaatggcagctgccgctgcaggcgacctgcctgatctacgtcggctccggctttgaacgtaaagggctggcggcggcgattcgcgccatcgcccctaccgatcgctacctgctggtggtcggcaaagataaggatcagcctcgctatcaggcgctggcgaagagcctgaactgtgaagcgcgggtgcgcttcttcggcatgcagtcggagacattgcccttctatcaaatggccgatggtctgctgctgccgaccctctacgatccgttccccaacgtcatcctcgaggcaatggcctgcggtctgccggtgatcaccaccaccggctgcggcggggcggagtttatcgtcgacggccacaatggttacgtctgcgacgctctggatatcccggcgctacagcaggcggtaatggccctgcccgcgcgcgcgctgggctccgcggaaggcggtcacgcccgcgagcgcattatggcctgcaccagcgagcgactctcaacccagctgctttctctttatcaggatctggtgaaataacgatgcgcatcttatttgtgattgacggtttacccggcggtggcgcggaaaaagtggtcctgaccctggcggcacagttcctgcgcgacggcgatcgggtgtcgctcatttcgctgcgcgatgtctgcgagtacccattgcccgaggggctcgactaccaggtagttgccgatcgctgccgtaaaccgtggcgcaagctgaccgagctgtcccgccgcgcccgccagctggatgccgcggtcgtgcgggccgaacagcaggggcaatttgaccttgtgctctccaacctgcacaaaaccgaccgcatcgtcgcccgcagccgggcgctgcgcgagcgtaacgtctggttctgtctgcacggcgtattctctgcctcctatctcgggcaccgcaccggctttgaccgctggatgaagcagcagaaaattaagcgaatttatcagggtcgcaacgtggtgacggtttccgacgcggtggggcgagatctggtggaagagtttgccctgcgcccggcacagctgaaaaccatctacaatcccttcgatatcactgccctgcgcgccgaggcggaagccgatagcgagcgcccggacggtgactacctgattcacgtcggtcgcttccatccgggcaaacgccatgaccgcctgcttgaagcctatgcgcagagcggcatcgacgcaccgctggtgctgctaggccagggaaaaccggagcaagagcagcgcctgcgccagctggcaaaaacgctgcacattgacgatcgggtgtggttcaaaggttttcagaaaaaccccttaccgtggatcaaaggcgcacggatgctggttttgagctccgatagcgaaggattcggcaatgtggtggtggaggcgctgctgttacatacccctgtcgccagcacccgctgccccggcggcgtcaccgagatcctcaccggcgaacttgcccgcggtctggcggatctgaccagtccggcgctggctcagacgatgcaaagcatttaccataacccgccggccatcgacgatgccgcgctggaaaaattcagcgtcgtatccatttgtcagcagtaccgtcagctgcagcgcacctgacgccgttagttaaccaggatcgaagatttatgagtcaaacgcctttattgagcatcgtggctgccgtctacaacggtgagaaatttctagcgcaattctttgagtgcattgaacagcagcagctggacagctatgaactgatcctggtgaacgatggttcgacagacaacagcctggcggtgatcgccgaatggcaggagcggctgcagaacgtccaggtgctggagcaggaaaaccagggcgtctcggtcgcgcgcaataccggcctcgccgccgccagcggcaaatatctcgcgtttccggatatcgacgacaaactctatccgggcatgtatcgcacgctgctggagatggccgagaaagaacatctcgatatcgccacctgcaacggcacctatgtgtacgaaaagcgccgcgagagccacccgatcttcccactggatcgcctgccctcgacgggtgtgctgccgggccatgtctggcttaagcaggccttggactcgcggaagtttctgcacgtcacctggcttaatatttatcgtcacgactttatccgccagcatcacttccatttcgagcctggcctgcgccatcaggatatcccatggaccacagaagccctgctggccgcggagcgcgtgcagtacaccagtcagcagttctatgattactacattcactctgagtcggtgtcgcataagccggacaacgacgacacgctgatgcgttcggcgcgccactatatgaagattctggagatgctggaggcgattaaccagcgctacccggataaagtacgccatatcgccgcctgtcgctggcagatcgccaaagaaggcctggggatcatccataccttcgatagcatgaaagatgagtccaaaaagcatgttattattaacgaattcttcgaccgcggtatctggcggttaatctggaaaaacgcctgtactttccgtttacgctggcgcctgggacgccgttatctgcgtattaagcgttatcgccacgcgggatagaccaaaaacccgctgtttccgccaaagagatagctttacgcgggctaaatgcttagaatttgcccgccaaaacagagaacggataaatagtttggaattgctttataccaccctactttaccttattcagccgctggtgtggctgcggctgctgctgcgcagtcgtaaggctcctgcctatcgcaaacgctgggcggaacgctatggcttctgtcagaacaaggtagagccggatggcattctgctgcactccgtttccgtcggcgagaccttagccgccattccgctggtccgcgccctgcgccaccgctacccttctctgccgatcaccgtcaccaccatgacgccgaccggctccgagcgcgccatgtcggcgtttggcaaagatgttcatcacgtctatctgccctacgatctgcccggcgccatgaaccgcttcctgaacaccgttcagccgaagctggtgatcgttatggagaccgagctgtggccgaatatggtggccgcgctgcataagcgtaagatcccgctggtgatcgccaacgcgcgcctgtccgaacgttccgccaaaggctatgccaaactgggcggctttatgcgccgcctgttgagccgcattacgcttatcgccgcgcagaatgaagaagatggtaaccgcttcctctctctggggctgaagcgcaaccagctggcggtcaccggcagcctgaaattcgatatctccgtcacgccagagctggcggcccgggcggtgacgctgcgtcggcaatgggcaccgcaccgcaaggtctggattgccaccagcacccacgacggtgaagaacaaatcatcctccaggcgcataaaaaactgctggagactttcccgaacctgctgctgatccttgttccccgccatccggagcgcttccctgacgcccgtgagatggtacaaaaggctgggatgagctttactctgcgcagcaccggcgagatcccctcctccagtacccaggtagtcattggcgataccatgggcgagctgatgctgctctacggcattgccgacctcgctttcgtcggcggcagcctggtggagcgcggcggccataacccgctcgagccggcggcgcacgccattccggtgctgatgggaccgcataccttcaatttcaaagatatctgcgccaagctgcagcaggacgatggcctgatcaccgtcaccgacgcgaactcgctggtcagggaggtgtccacgctcctgaccgatgaagattaccgcctgtggtatggccgtcacgcggtggaagtgctgcaccagaaccagggcgcgctgtcgcgtctgctacagttactgcaaccttacctgccgcagcggagtcattaatgtctaaccggctttccgtggtgatgatcgccaaaaacgcagcggacctgctgccggattgtctggactccgttagctgggcggatgaaattatcgtcctcgactccggcagtactgacagcaccgtcgagctggcccgccgcctcggcgcccaggtctatacccataccgactggcgaggctatggcattcagcgccagcgcgcgcaggattacgccaccggcgactgggtgttgatgatcgataccgatgagcgcgtcacgccagaactcaggcaggctattcttaaggtactggacgccccccagcgcggcgccatctacagcatcgcccgccgtaactattttctcggacgctttatgcgccacagcggttggtatcccgatcgcgtcctgcgcctgtacgaacgcgcccgttaccgctataacgataatctggtccatgaatcgctggatagcctgggcgccgaggttattccgctgaccggcgatctcctgcacctgacctgccgcgacttcgctggtttccagcaaaaacagctggcgtatgccgccgcgtgggcgcttgagcgtcaccagaagggcaagaagacctcgatggcagggattttcagccatacgctgggcgcgttcctcaagacgttgctattgcgcggtggggtgctggacggtaaacagggatggttactggcgatggtcaacgcgcagtatacgtttacgaaatataccgagctgtgggcgctgagccacggctactcggagaaagagtcatcatgagcacaaaagcgatctatccgggtaccttcgaccccatcaccaacggtcatatcgatattgtcacccgcgcggcaagtatgttcgataaagtggtgctggctatcgccgccagcccgagtaaaaagccgatgttcagccttgatgagcgcattgcgctggcagagcaggcgacggcccacctggtgaacgtggaggttatcggcttcagtgatttaatggccaatttcgcgcgcgcgcagcaggccaatatcctgatccgcggcctgcgggcggtggcggatttcgagtatgagatgcagctggctcatatgaaccgccacctgatgcccacccttgagagcgtgtttctgatgccgtgcaaagagtggtcgtttatctcttcctcactggtgaaggaagtggcgcgccaccagggcgacgtttctcactttctgccagctaatgtgcatcaggcgctgttgaataagctgaagtaacgcatctgccgggacatgagccacgtcggctggcgcagcactgcgccgctgggtcattcacaccggctctgtcccggtctttgtgccagatggcgctacgctgacctggcctacaaacgcccccggcccaccagatgcgcacccgcaggcccgctgacctggccgacaaacattcctgttcctgagaactacttctggcactgacggcaataaaaggtcgcccgctgggcatgtttggtcccgacgaccggcgtgccgcagatccggcagggttcgcccttgcggccatagacctgtagctcctgggcgaaatagcccggcttgccatcgctttgcaggaaatcctttaacgtggtgccgccctgctctatcgaacgcagcaggaccagcttaatcaccttcaccagctgctcacactcttcccgcgacagcgaggacgccagccggtcaggatggatcccggcggagaacagcgattcactggcgtagatattccccacgcccaccaccagcttgttatccatcagccagggtttgatcgcggttttcttcttcgcgcatttttgctggagatagtcggcgttgaacgcgtcgctgagcggctccgggccaagatgggccagtaccggatggccttccagcgttctggtccacaaccaggcgccaaagcggcgtggatcggtgtagcgcaacaccttgccgttactcatgaccaggtcaacgtgatcgtgtttttcagcaggcagctcttcgctcaggatgcgcaggctccccgacatcccaagatggacgatgatccagccgtccggcagctccagaagcaggtatttggcgcggcgacgcacgctgagaaccggaacgtcgctcaggcgatagatctcttcggaaaccggccagcgcagccgtccgttgcgcacgacggcgtgcagaatggttgcgccaaccaggtgcggctcgatgccgcgacggctggtttcaacctctggtaattcaggcatgattttcctccgtttacccgacgtattgtgcttcacggacagatgactgaaaagggagtatgtgaaagcaatatgggggagttttaaaaacaaaaaaccccgccgaagcggggtttttatacaaggaggctaaaattatttaattttagcttctttgtagataacgtgctgacgtacaaccggatcgtactttttcagttccattttttccggtttggtacgtttgttcttcgtggtggtgtagaagtgaccagtaccagcggaagaaaccagcttgattttctcacgaatacctttagccatgatttatttcctctaagtacttagtacttttcgccacgggcacgcagttcagccagaactgtatcgatgcctttcttatcgattacacgcatacctttagcagatacgcgcagggtgacaaaacgcttctcgctctcaacccagaaacggtgagagtgcaggttcggcaggaaacggcgtttagtcgcgttcagtgcgtgggaacggttgttaccggtcaccggacgcttgccagtaacttggcagactcgggacatgtctattctccaaaaatcaaattagctcgagcttcgtatggggtattggcgcctcgtcaggctttacagcctggtcatcgcagttcaatgtgaactctcgactgccaggcccaaatgccaaacccgagattctcaaaggtggcgtagtatacgctgactcggcgatgtgctcaagtcccgaacagacaaagatcccgaaggatcgccagttcggggctaaatccagccacgttcggcaaaagatacatacgcaccgcggccgataaccagatgatcaagcacgcgtatctccatgaatctacaacattttatcaccctttcggtaatcagtctgtcggcctgacttggctccgggctaccggagggatgattatgcgcaaggatcacggcggcggcgttcactttgatggcttcgcgtacaatttctcgcggatgcacctcaacgtggctaagagtaccagaaaaaagacgactatgtttcaacacccggttctgattatctaaaaagatcaccataaagatctcgcgctcctcttccgtcagctggctttgtaaaaactcgcgcgtcatcgagggggtgaccagcgcggcctcctcgaccagctgcgagctaaaatagcgtcgcgccagctcggcaatgcccttcagttgggcatatttcgccagccccagtccgtctacagcaatcagttgcgctttatcagcggaaagcagagcgtagagtgagccaaaacgctgcagtaacgcctgggcatagctgagcacatcctgacgacgcgtgccgacgcgcagaaacagcgccagcagctcaacatccgttagcgtttcgatgccgtattgcagcatcttctcccgtggcatcagattttccattccgtccatgcgccctcctgggtgaatcagcctatcctggcacagcctgacggcgctgccgacccgccgattttcaccctgcgtagccgctcgcaaagtgaatgcccggcagaggcacgacggcggcaggattgtgataagatgcgcggattctggtctacggcaacaggaagacatcatgatgactctggcgggtaaaaaaatcgtcctgggcgtcagcggcggcatcgcggcgtataaaaccccggaactggtgcgccggctgcgtgaacgcggcgcggaagtgcgtgtcgcgatgacggaggcggcaaaagcgttcatcaccccactcagcctgcaggcggtatccggctatccggtttccgacagcctgctcgatccggcggcggaagcggcaatgggccatattgagctcggtaaatgggccgacctggtgatcctcgccccagcgaccgccgatttaatcgctcgcgtggcggccggcatggccaacgatctggtgtcgacgatctgtcttgccaccccatccccggttgccgtggtgcccgccatgaaccagcagatgtatcgcgcgcaggccacccagcataatctgcagacgctcgctacccgcgggctgctgctatggggaccagacagcggtagccaggcctgcggcgacgtcggcccggggagaatgctcgatccgctaactatcgtagacatggccgcgcagcatttcgcctcccctgtcaaagatttgcaacatctcaacctcatgattaccgcgggcccgacccgtgagccattggatccggtgcgttatatcaccaaccacagctctggcaagatgggcttcgcgattgccgccgccgcagcgcagcggggcgcgaacgtgaccttgatcagcgggccggtatcgctaccgaccccgccgtttgtgcagcgcattgatgtcactaccgcgctggagatggaagcggccgtccaggctggcgcccagcagcagcacatttttattggctgcgccgcggtagcggattaccgcgccgccgtcatcgccgaagataaaataaaaaaacaaggtgatgaattaacaataaaaatggttaaaaacccggatatcgtggccggggtcgcggcgctaaaatcacatcgcccctacgtcgttgggtttgccgccgaaacgaataatgtggaagaatatgcgcggcaaaaacgtgcccgcaagaacctcgacctgatttgcgccaacgatgtttcccagcctaatcagggctttaacagcgacagcaacgcactacaccttttctggcaggatggggaaaagcgcttaccacttgagcgcaaggaactcctgggccaattattactcgacgagatcgtgacccgttatgatgaaaaaaatcgacgttaagattctggacccgcgtgtcggccagcaatttccgctgccgacctatgccacctccggctccgccggacttgacctgcgagcctgtctcgacgacgccgtagagctggcgccgggcgcaaccacgctgttgccgaccggccttgcgattcatatcgccgatccctctctggcggcggtgatcctgccgcgctccggcctgggtcataagcatggcgtagtcctgggcaacctggtgggccttatcgactccgattaccaggggcagctgatggtgtccgtctggaaccgcggtcagcagagctttattatcgagccgggcgaacgtatcgcacagatggtctttgtgccggtcgttcaggcggaatttaacctggtggaatccttcgatgccaccgaccgcggcgaaggcggcttcggtcactcagggcgtaaataagcccagcaacacggaatctgcatcccaacgcgcataacgcaataacattaccgcaagccctggtttgcggtcgcgttgtggatgtctgcctgacaagtgcttattttcaggggtattttaaaacatggcagaaaagcaaactgcgaaacggaatcgtcgcgaagaaatacttcaatctctggcgctgatgctggaatccagcgatggtagtcagcgtattaccaccgcgaaactggcggcttccgtcggcgtctctgaagccgcgctgtatcgccattttcccagcaaaacccgcatgtttgacagcctgatcgagttcattgaagacagtctgattacgcgcatcaatttgattttgaaagatgaaaaggacaccaccgcgcgcctgcgcctgatcgttctgttgattcttggctttggcgagcgtaatcctgggctgacgcgtatcctcaccgggcacgcgctgatgttcgaacaggaccggcttcagggtcgcatcaaccagctttttgagcgcatcgaagcgcagctacgccaggtgatgcgcgagaaaaaaatgcgcgaaggcgaaggctacaccctcgacgaaaccctgctggccagccagctgctggctttctgcgagggcatgctgtcgcgctttgtgcgcagcgagttcaaatatcgtccgacggatgatttcgacgcccgctggccgctggtcgccgcacagctgcagtaaatcctcacatgcagccgccaggctgcatgattctcctcgcaatctgcgtaagtttgtcgcaaatcccagggccattggttgaattgcccaatgcgcgtttccgctttcctttcctactatccagcttgctgaacatttcaccctcccccaacaccacccgacaaggagagatttgatggcgacgtcacggcgggatttactgaagataggcgggttggcaaccgcatcgctactggtcagtcaaaaaagcttcgcagcatgggccccctctgaacgctatccggacccacgcatcgtggccgtcgatgatagctttcgtcgctatatgcttgccagcgcaaaggtcgaacgcatcgccagcggcttccgctgggcggaaggcccggtctggttcggcgacatgcgaatgctgctgtggagcgacattccgaataacgccatcatgcgctgggatgaagtcagcggagaaaccagcgtctttcgctacccggccaattatagcaatggtcacgcccgcgacagacaggggcgcttaatcagttgcgagcacgacacccgccgcattacgcgtaccgaatacgatgggtctgttaccgtactggccgatagctaccagggtcatcgcctcaattctccaaacgatatcgttgtgaagtcagacggcaccatctggtttaccgatccgccatttggcatcagtggtttttacgaaggccacaaagcaacatcagaattgccgcaaaacgtctattgtctggagccggaaagccgcaaactgagcgtggtactgggcgacgtaaaagggccaaatggtttgtgtttctcgccggacgaaaagaccttatacgtggtggaaagccgggcgacaccgaaccgcttaattctggcgtgggatgtggaaggcaatacgctgaaaaataaacgggtatatctcgactgtgggaacggtaccgccgatgggatcgcctgcgacgcagacggcaatctgtggtgcggatggggaagcggaaacgaagaactcgacggcgtgcggatcttcaacccacagggtaagcatatcggcaccattaaactgccagagcgctgcgcgaacttgtgctttggcggcgaacagcgcaatcgtctgtttatggcgtccagcacgtcaatctattcgctgtacgtcaatgcgcagggcgctaagctgatatagcggaaatccggcagccgaggctgccgggcgcatcatcagacgccgtaggcttcacgataggcgcgaactgacgccaggtgttccgccatctcgggtttctcttccagataagtaatcagctctttcagagtgatgattgagataacctggcagccgtaatcccgctccacttcctgaatggcggagatctcgccgcggccgcgttcctgacgatccagggagatcagaacgcccgccagctgcgcgccctgggcctggataatctccatggattcgcgaatcgccgtaccggcggtgatcacgtcatccaccagcattacccggccctgcagcgggctaccgaccagattgccgccttcgccatgggtttttgcctctttgcggttaaagcagtaaggcagatcgcggtcatgatgctcggctaacgccaccgcggtggtggtggcgattgggattcctttgtaggccgggccaaacagcaggtcaaactcaattccggaatccaccagcgcctcggcataaaaacggcccagcagagccagatcgcgcccggtgttaaacaggccggcgttgaagaaataggggctcttgcgcccggatttcagcgtgaattcgccaaacttaagaacctgcttgctaagcgcaaactcaataaactggcgctgatacggcttcatggattcgctcctttggtacttttcatcattgtcagactgcgcgctccccttcgcaggtgtgatgaaggataaagcgcaaaaaaaaggcgacttctcagtcgccttaatcattaattttctaacgccgccttctgcgtcgtgataatggactcgatccccctcgggctaacgccaggagagtgaggagttcttcatgggtaaacggctcaccttccgcagtgccctgcacctcaataatacggccatcttcggtcatcaccacgttcatgtcggtctccgcggcggagtcttcgatgtactccagatcgcagatggcttcgccatttacgataccgacggagaccgcggccaccatccctttcatcggattggttttcagcttgccggcggcgaccagcttattcagcgcatcggccagcgccacgcaggcaccggtaatggaggcagtgcgggtgccgccgtcggcctgcagtacatcgcagtcgagagtaatcgtgaattcgcccagcgctttcaggtcaaccgctgcgcgcagcgcgcgggcaatcaggcgctgaatttccatcgtccggccgccctgcttgccttttgccgcttcacgcgcgttacgcgtgtgcgtagaacgcggcagcatgccgtattcagcggtgatccagccctggccctggcctttcaggaaacgcggaacgccttcgtcaatagaggcagtgcacagcactttggtatcaccgaattcgaccagcacggagccttcagcgtgttttgtgtaattacgggtcagggtgacgggacgcacctgattagcgctacggcctgctggacgcatgatagaaatctccggcttgaaacgaatgtgagggcgcattatacgaatttcatggcaaaaagcctatgcccactccagccggacgcgccgataatgtcagtccagcgttttacgataagatttcaaccccacgccaatgacaatcaccgccaggcctatcagcggcaagaggtcaggcaacaatgccgttgctgaatagcctttcagcataatgcccttaaccaggcggatgaagtaggtcagcggtaaacaggagccaatggctttcgcccagtctggcatactaataaaggggctgacaaatccggacagcataagtgaagggatgaaataaaatgacgacatttgcagcgcctgcagctggttttgtgctaagccagaaataccgataccaattgacagacaaagaaagacataaattaacagcacaaaaaatagtaggaagacgctaccgtgaagggggatatcgaacaacaaaacggcggcaatcaggattaacgtcgcctgaaacagaccaatgataacaaaaggcgttattttcccaataatgacctcaagcccggacaacggagagaccagtaaattttctaacgccccgttttctcgctcgcgggtaatagacagggcggtcatcaggattaacgttgtactgagtatagaccccataataccgggaatagtattaaactgggttatcccctcagggttaaacatgcgatgaatgataagctcgaaatcatcctctttttgcaccacacgcatgtcgcccggcaaatcgtgctgaaacatcgacttcgccacctgcacaagggcgctgagcgcattccccgtggtgatcggatcgatggcatccccctgaattaatagttgtggcttttctccacgcagtaacttgcgcgtaaacccttcagggatcgtcacgataaaagtgacatcccccgcacaaaggctttctgcgccgcctcttctgaatcgacaggaatcatcgaaaaatacccggtattttgcgcttccgtcacaaagatttgactcatgcgttcggtatcataatttagtaaggcggtcggaagattatgcggatccatattgatggcatagccaagaatgatcagctgaaaaagaggtgtcaggagcaccatactgatgctgactttatcacggcgtagctcgtgaatttccttaataaccacgccaatccaccgcgtaatggagaagctaaaattaatttttttcacaattatttttcatcaagtaggtaaatgcatcttccagattggtatccaccttacagaactcataaccctgttgcgtaaaggcaaaaagcgcggattttaacttcgcttcatctctggatgtaatataaagctgattgccaaaaatgaccgtttgctcaatatccggcaagcgctgtagctggctttcaagcagcgtcagaccggcgccgctggttcgcatggtgatcaaattctgggaggcgataatcgacgcaatagtgccattcgccagcagccgaccataagatagataggcaaccttatggcagcgctcagcctcatccatataatgcgtgctcaccagtatcgagatcccccggtcagagagctggtgcagcatttgccagaactctcgccgcgccttgggatccacgccagcagtcggctcatccagaaatagcaaaacaggttcatgcaacatacaggcggcgagggccattctttgcttccagcccccagaaagctccttagccagctggtgctgtcgggcagtgaggcctaactcagaaagcgcacgttcaacccgatctctacgccgatcgaggctatataatcgcgcaataaaaagtaagttttcccgaatagttaaatttccccacattgagaaatactgggtcatgtagcctatctttttctttatcttttcccgctgcgtaaagatatccatacccagacaagtaccttcaccggaatccggcgtaatcaaaccacacatcattcgaatcgatgtcgtttttccgctaccgttcggaccgagaaaaccatagatctcgccttttgctacctgtaaagagaaatcctttacgacgtgatgctcgccaaaatgtttattgagattttttacatcaatacaaagattattcatcgccaataatctccacatcaaacggttggccgattttcatccgccctgcctgctgcagcgcagggatagcctccgccataaaaatgagcttctcacgacgtttcgtactataaataactggaggcgtaaactcggcctcagggctgatatagttaataacgccagcaatgggctcagcgcaaccatcgcatataagttttaccttagatccgattttaaatttaccgagcttcgcttcgggtataaagaagcgtacttttatattctcaggaggtaacagactgattattggtttaccagcagaagggcgctccccggcacgataaataatatcgaagactttagcattgaccggagaaacaatcgtcgtttgctggacatcccacagcgccttatcccgttcgagttttgccgcggccaccattgagcgctgcttgctaatctcatcctgccgggcagggagttgccgtgctttgagttgattaattaactcttcaacctgtgcgcctttttgagttaattcatcccggatatcctcccattccgcaagcgatatggcatgattggcgtaaagattacgatatcgcccaagctgccgctttacctgggattctgccgattgtgctttttttatctgcgaacgtataatatccaactcttcaggccgttcgccagattccagatttcgtaatagagcgctctctgctgatagcttttcctcagcgcgcaggaaaatattttgcgcatcgaaggactcaatcttcactaactcctgtcctgcggcgacgttatctcctttattgatcaagatccgttctattttttcgttaccagaatatgaaaggtatacaaattctccatgtgaataaccggataacatgttatctgatttgttatcacatccggtgagtatcagcaccgatatcaatataataaatatatttattggctttcgcattaaaacgcatccatacgcatatcatttcccttatcactacggtctggattaaggcacgctcgctccaggaccgtacagtcatcgtcagtttaatcttttaaataatgcttaacgtagctttcattcaatttatctatagagctcagatttaacccagctatcgaattaaaagaatcatcttttgtgaatgcaagaatcgacgatccgcccggggagaaccatttagcactctgtttaaaaggccagggaagttcataaccttcttctctcagcaggtgattaagcatgctccagtctgctctaaaatcttcgccacaaaatggagtatcatcctgtacattttcggcagtgaacaatgctatcggcgtacaaaaatcagttgtcgaggaaaagtatatattatagaaactgatgatgagtttctgtactttttcaggaaaagttccaggaatggtcagcacacccagcaagtatttatagtccggatatctttttataaagtcaaatatcccttgccataaataatcaagcaccttacttttttgataaggtttctgaataaagccgcggccaatttccacacacttctctaaacaggaataggcattatcatggtatttaaacaagctgttgctatagaggcctgttacaccatgttgggccagctgctcgccaacgggcataacacgatatgctcccaggatttccacatcagaaggatcccacaaaatgatatgataataactttcatcaaaaacatcgttatctcggtcgttaccagttccggcaccaatatcgcgataacagcgttcgcgtaagcgccctaactcatcaataataggtgaggttcggttagtattacagcgatatatcactagttttctaccgtcttcaaactgccttaatatttcgcactcctctattgcgctaattagctcctctttacctggttctaattcttgcggcgcaatcgtatctaacatagccgggccattcttcgctatactctggaggtgcgtcaaacatacatttgccgcggcagaaagatctttattgtattctttaaacgaggataaggctatttgctgtcctatattgattttcatggtcttgccatgatggcggagagcttcacgaataaccatcatgttcgacagttgccgccagaatgttgcagtaagataataaatcttactgtttgctcccgtaatatgaattggtaccaatgctgcattatttctcatagcaagctgtaaaaaaccggggttccacttatgctcctgtaacccggaaagagaccagttagccagcttacccgcaggacatataatcaatacgcctccttttcgcaggtgatcgttcatctcgcggaattttttatggctcatcttaccggccatattctcaattccaatggtaagttccgatacctgggggaatataattggcaaaacgtgattggctattatttttatatcactcctgactcgagagaccgtatgtattaagctaagtccatcgattaccgtcggatgatttgaaataacaaccgtagccccatgcccaggtatgttgttaagttggtggcgttcgctttcacatttcaactcaaggagttcaacaactgcattaacccactcgaccccatttttattaacgagtcgctcgttatatattaagcgagaaaataccttattgccaaatgccgtcctgaatagccattttttccaaaaaggtatggttgtatttggaaaaaattcccttacgactctgtcaaagatagcgtccatattaaaatcctttttatagaactcatcgtaaacgactatactagcgttctttcagtcggacaataccgcataaaacttaaaaaggccaaaacaaaacaattagatataattaatacaacagtattctcaccataaatacaatcaccnnnnnnnnnnnnnnnnnnnnnnnnnnnnnnnnnnnnnnnnnnnnnnnnnnnnnnnnggtaataccctatctcatttctggtggttatacttcctaaaactcacagaatagcttttctggcrgtatatgcatttgtacaaaggcatccgaattccatgcccgtatctaatatcagaaaatattaaccatggattcccataatatataaccccacctacagcccctggtgaaaataactttgcggcgatatcccttaaaacaatcgtccttgaagtatttcatcactattcctgttaagtcaccgcccgcacggctataatccttgcattcattattacgaaaacaggaacgcctatgatccgcagtatgaccgcctatgcccgccgtgaaatcaagggtgactggggtagcgccgcatgggagctgcgctcggtaaaccagcgctatctggaaacgtacttccgcctgccggagcagttccgtagtctggagcccgtggtacgcgagcgcattcgcgcccgcctgactcgcggtaaagtcgaatgcaccttgcgttttgaacaagatcccagcgctcagggtgaactcatcctcaacgaaaagctggctaaacagctggtaaacgctgccaactgggtgaaaatgcagagcgatgaaggggaaatcaacccggttgatatcctgcgctggccgggcgtgatggccgccaaagagcaggatctcgacgccatcgccgccgacattctggccgctcttgacggcgcgctggacgacttcatcgtcgcccgcgaaacggaaggccaggccctgaaagcgcttatcgagcaacggcttgaaggcgtgagcggcgaagtggcgaaagttcgcgctcatatgccggaaattctccagtggcagcgcgagcgcctggtcgccaagctggaagatgcggaagtacagctggaaaataaccgccttgagcaagagctggtgctgatggcgcagcgtatcgacgttgccgaagaactggaccgtctcgaagcgcacgttaaagagacctataacattctgaagaagaaagaagctgtgggtcgccgtctcgactttatgatgcaggagttcaaccgtgaatcgaacaccctggcgtcaaaatcgattaacgccgaggtgaccaactccgcgattgagctgaaggtactcatcgagcaaatgcgcgagcagatccagaatatcgagtaagtatttaagcgctatcacaaagacgcacgaaaccagcaaagcccgcacatcgccgggcttttttgttatcatgggctatcataaaaacgcaacaaagagcatgattgccgtgtacacctaggtgtaccaacggcgttaggtgtactcatctaggtgtacaccccttattaaaagtttggaatagtttggatattcgcaaaatgccaaaactcacagacatgcagatccgcgcatggataaaggccggggagcgattcgagggacgctctgacggtaacgggctttatctttcataccgcgaaaactaccagacacccgtctggcgcttccgctataaattcgctgggaaaccccgcgcaatgatgatcggttcatatgccgagctatcactatcaaaggccagagagacagccaaagagctatcggctcgcgttgcgctgggctatgacgttgcgggagagaagcaggagcggaaggccgaagcgctggcgaagatggaagcagagaaaaacgccatgcgcgtttcagagcttgccgctgaatactttgagcgtcagatcctgccccgctggaagcaccccgacattctccgccgccggatagacaaggatataaatccccacatcgggcgcatgaaggtagaggacgtaaagccgcgccatattgatgacatgctcaaggcgatagtagaccgtggagcgcctaccatagcaacggacgttctacgctggacgcgccgcatattcgactacggaatcaaacggcacgcgctggagattaacccctgttcagcctttgaggtggcagacgctggagggaaggaggttagccgtgaccgctggttaacccgcgatgagttaatccagctattcaaagccatgcgcacggctaagggtttcagtcgccagaatgaaatcacgttcaaattactgttagcgttatgcgtccgcaaaatggagttatgcgccgcacgctgggaggagttcgaccttgatcaagctgtctggcgcttgccagaggaacgcagcaaaaacggcgacgctatagacatcccattagcaccgccagccgtcgaatggctgagagagcttaaaacgttctcatgcaacagcgcctgggtactgccagccagaaagatgcaaaaccgcatgatcccccatattcaggaaagcaccctgcccgttgcgctggcgaaggttcgcgctgaaatgccggacgtgccgagcttcactattcacgacttccggcgcacggcccgcacccatttagccgcgctgggcgtggatccggtagtcgcagaaagatgccttaaccacaaaattaaaggtgtggagggtatctataaccgccaccaatactttgatgaacgccgggccgcgttaacacagtgggcgggcttgctggtggcactggaacgcggcgaagaatacaacgttacaccgctgagaaaggcgaagtaaccaagatatgtaaagaataagaggacagattgagcctagcccgacggggtgaaaagcgggaagccttaccgcctggctcaatcactttaaaggcatggcgtaaaaggtaacgttatggcacatggcaaattaattaatatctgggaaaaaaataccatccctccattaccgtggtgctcactaaacagagcagcaacactattgaagtgcgaattatcagacttctcagcatggatgaatcatctaaatcctatgattgaatttaaacaaagttcagtggaaggtactctgacggttacattgaataactatgataacccatatgagtatggggatatttcaaaagaatatattgaccttatacctgtggcatcacgaggcggattgactccaacttcgccaatgatagataccgcattcaccattgataaaaataaaaaaacactggattttgtgggctactttgatggcatggcatccgttttggaagggatgtatttaattgaaaatgatgaactaattgtccttccgcaagatttgttctgtgagattcctattgcaaaactaggcgctccttatgttggtgaagactgcccggtactgtcagtagatgatattttaattagacctgtttatgcgtattgctacgatgctcagccaattgttttgagtatgaatgatgtttatctaagcagggaggatatagagctaatttacaattgcggagtccaaggtatagatttaccagaagatagattgaccgtgcctgaatcaattaaggctaagccaaaaattagggaaacggcaaagcaatctagatttattgcttatctaataaatgctttaggcgtgaagcaagacgaactaaaaacactttccatcaaaaatattatggatagattaagccatatggcaaatgagattaaatttcctgatgtaacggatgactctttacgggattggttggaaaaagccggttataggtaattatggttagttttcgccaatgaagatgtgccgttagtttcaagcaaacaatctcataactcggaggaattttctaaaactcggcgagattgtgaactgctattgatagcctttccatcaccagctatcacaggagttacgggacatatgacagcctctcaaaccgcacaatcagcacttcccactactggatacatccgccgctttcgaatgccggcgttgttaggggtgtcaatgccaaccattgatcgatgggttaaaaacggcacattgccacgcccggtgaaactcaccaataacgtgactgcctttgatgcggtagagattaacaaatggctggcagaacggcgcgggaaggtggcctgatgaaaaaagaaaaccgcccattacaggcggctaacatagatattcgcggatctgatgttacgccactagcctacaccgttcaagcctcaaagcgcattccgaagaaacaccgcgcccgcacctacatgctgcgttgtggggctggtgggtggacagaaaacgatatcctgcgcaattgccggctctcatctggccgcaactatgcgagcgaacttgagcgtgagcttgatatctgcctggaacgccttgaagagaaaaatcctgatggtatcggggcgcacatgcgctaccggtttgcgtgccgtggtgacgtgctgaaggtgattcagttcgttaaccgcatggccgcagtcaaccaacactacgggctttctaagcaggatatcgccgacattctgaacctctacccggacaacttcaccgccgcataacggagccgaaaaatgaaaatcgaaaaaagcagattcaattctgaggccgcccctcaacccaacgttaacccgggcgtaactaacggcaatgactttgccgccatcgttcccgttattcccggccaaattggcgggcgcgaaaccaatattgcgagcgccagagatttgcataaagcgctgggtgtgggccgcgactttaccaactggattaaaggccgcatcgaccagtacggatttgtggccgggactgactacatccgtgttgaaaatttgagctcaccaaaacgggcgagcgcaaaatttcgccagcaaatcgagcatgattaccttctctcgctggatatggctaaagaagtggcaatggttgagcgcaatgaacaggggcgcgccgtccgccgctatttcatccagtgcgaggaagcgctacagctgagtgcgccggaaatcgccgcgaagtatcgccggcacctcaaagcccgcattggtgctgctaacctcttcaagccgatgtgcgccgctctggatgctgcccgagcagaacaggggaaagagacgcaagcccggcactacagcaatgaaagcaacatgatcgcccgtattgtgctgggtggcatgaccgctaagcagtgggcgcaggtgaacggtatcgacggcgaaccgcgcgatagcatgagcgccgcccaactggaacacctcagctacctggagggtacaaacatcacgctgatcgatatgggcatggagtacggccagcgtaaagcggaattaacccgcctctctcagcgttggctggctaaacgtctgggggctaacgatgaataagcccaccagcacaccgctgccaaaccactcctatcgcgacgctcacggccagatggtgagcgtgaccgctgtagcgcataaccgcgtgacgttctatcgcgaggggtatcagttcccgtgcgtacagcccattgagcgcttcatgaaggagtacacggaggtgaagcaatgattacctccgcccagggtaaaagcctctctctggctggcctgatgtatgcaaaagttaacgatcttcgggcggtgtgtcaccgcaggagcctgtcaaaacctgtcattctgtgggccaatagtggctctgttgaagtttatttcgaggcaggtacgcgcgcgggtaagcgttcggaaactgactatctggaagatagcgcgtccggcgccggcggtggatgtggagcacatcacaccgccagctataaattgccgcaccgtgacaaaaaggacttgcggtctgaaggtatcccagtctatggtaatagcgcaccagcaaaatctggtgccgggattggcgtcctggtaattcgaatggcgacacatgacgcgcctagcgtctttttttgtgccgttagtctgactcaccctttttttgagcgttgggatataatccagcgcctcgcaagagcaatggtggctcaggcaggggcttcttcggaagcgccggtatccattcgagccggttacgccaaccctgcttgggctaccaccagtgaaattggcgtttccggtggtagcgttacccgctatcgaatggaggctgccgcatggctactaccctcacccaaattccgcaatttatctggattatcgccgctgttcgccgcgatatgccgacaattaccgcaaaaattcaccatatcgccgcacctactgagcgcgaagcccgccgttctctggttcgggatcacgtctgctttttcgctggccgtatccgtctggaggtggctcatgcttaaaacctacgatgtgcctgttaatccaactgaacgcacccaccacctgatttctctggcggagctgatgcgtgatgtattggacagtaaagctgattctcgcgaggactatctggaggcattgattgccatgctggagatgtctttgcgcgatctgcatggtctgctggaaggtaatgaactgccggaggtgcgccatgcgtaactatttccgcatcaccggctacgccgttaataagcgcggtttaacggtagggatcggctatcaactcacatccagcgacactaaaacagcaactgcccacgcagtgcttcaggcgcagcgtgaaggtttcagccatgtacgcattacacgcgttcaggaggtggcagcatgagcaccgcgattaccaccgtccccaacgaaatcactacccccccgaagttatccactcaggagatgcggcggcggtagtcatttacgccagtgagcttctggaactgtggaatttgcaccttgataagccactgcgtgccgccaacccgctttttgccgcgcggcttgggacgctaatagttgaaatgcgatgcgcagccattagaaccgagcgcaaagttaatcgcctggctgatgaactaacgaagatgcgtgagtaccgggagggcggcgcatgagcaagttatccctgattgattcagcctgccgtatcaagcaagcgcagcaagttctttctctttggcttgaagcaccgattaaaaaagatagcggcacggatcatcttattggcgcagtcattacccttctggatggtatccccgagctgatggattcagtagaaggcgagttagttgatatggatctaagtttgggcggtaaagcatgagcaacgcacagaaattcagaccgggaagtgccgacttattacacgtcgaggccacgccagacggtatcaacattctgacgctgaacgatgacggcctttggcagcattcgcggatgctgggctactccgctgcgattcgccagcttgatagcggcggctatgaccgtgatttgaccgcagggatgcaggttatttccgggatctgggaagccgagaggaaaggctacctcacagaaagtagcgagcaaatggcgattgtctggcgctggctggtggcctgtctgttcattctggagcagcaggaacgcaacggcacggtagatatagccaacgacgagggcggctatgatcgtgccgtgaagtacgtcggtagacatggcggaataagcatttacccggctacggaacgcttttcactggcgaaccacgtcgaggcgctggcaattgagaaatatggcgcagatacaggattgctgatggctgttcatatgtaccagagcatgacggagacagtgccggggaaagggatgaaattgtctgctgtggggcgtgaattgctggaaggatcgcacgacagctttatccagatgctgaataccgaaggtatgccagcagcgccaacagcgcactgagggggtaacaatgcgtaatatcgaccttatccgcgaagtgaccaccaccgccgcgaacaactggcctcatgtgctggctggcctgtctatcgacgtgcctgattcatcacgccgtcatgccccctgccctgcatgtggtggaaaagaccgtttcaggttcgacgataacgggcgcggtagctttatctgcaaccagtgcggcgctggcgacggcttagacctgattaagctggtgaaccactgcgacaccaccgaagcggcacagcttgccgctgacgtgctgggtattgattaccgggctgcggaaacaaaccagaaagcagccagccagagaagggagcagatggaagctgaccgccagcagcgggagcaggagcgccagaaacaggcagcggaggacgcagagcagcgccgggctacgtttgcccgtctgtatggtgaaatgcgccagagcgccacagagggtgaatctgattacctgaaatcaaaagggctgaccgggtttaattaccccattctgcccgatggctcgctattgctggcgctggtggacggatccggcgcagtcaacgccgcgcagaccatcaccccacagggagaaaaacggcttctgaccggttcggcaaagcgcggggcatatcacgccgtaaacgcaccagaaacgccgcagagcgttttaattgccgaggggctggcaacggccctttcagttcacctgatgcgcccggacgcgctggcagtggcagcaattgacgcgggcaacctgctacccgttgccgaagtgatgcgccgtaaacacccgaaggcgcaaattattatcgccgcagacaacgaccaccaccaaaacggagaagccaatacaggctgggaggccgcagagaaagccgccttatccgtggctggctgggtatcacttccaccgactgactataaagccgactggaacgacttccaccagcaaaacgggctggaagtcgctacggctgcgtttaacgattcgatgtaccagattcagggggaagccgtgaaaccacggttgcaggccattgagggcggtaaagctgaccagccagagaaagacccgctaaagccccgcattgagagccgcaaagatggcgttttctgggtaacgcctaaagtggacaaggaaagcggggagatcatcaacaatgaaagctggctggcctcaccgatggacgttatcggaaccgggcgcgacgacaaagaccagtatttgataatcagatgggcggcttttggcgcagataccgcaacgaccgcagctatcccgctggctgatattggtgagcgcgagggctggcgcaccatgaaagcgggcgggattaacgtcacgaccaaaagcagcctacgggcgatcctggctgactggctacagcgcagcggctcgcgtgaactatggcgcgttgctcatgctacgggctggcaatgcggggcgtacatcatgccggacggggaaatcatcggcacacctgagcggcctgttttgttcagcgggcgcagttcagccgctgccgggtataccgtagcaggaacgtcggaaagctggcgtaacagtgttgcacggctggcatacggcaactacgcgatgatgacaggcatcgccgcagcactggcagcgccattaatcggggtggcagagcgtgacggattcgggattcatttttatgaacaatcgagcgccgggaaaacaaccgcgcagaacgtggcgggcagtctatacggaaaccctgatgccttgcgcctgacgtggtacgggacggcgctggggctgataaacgaggccgccgcccacaatgacggactgatgccgctggatgaagtcggacagggcgcagacccgataagcgtttctcagtctgcctatgccctgtttaacggcgtggggaaattgcagggcgcaaaggaaggaggcaaccgggatctgaaacgctggcgcaccgtggcaatcagcaccggggaaatggatttagaaacgttcatcgccaccgcaggacgcaagacaaaagcggggcaactggtgcgactgctgaatatcccgctgagtaaggcggtgcgctttcatgagtaccagacagggagagaccacgccgacgcgctgaaagacgcttaccagcaccatcatggcgctgccgggcgggagtggattagatggctttcagaccaccagcagcaggcgattgatgccgttcgtgagtgcgaggcccgctggcgcagtcttattcctgccgactatggcgaacaggttcaccgtgtaggggcaaggttcgccattctggaggccgctttactgctgggtggcgtggttactggttgggatgctcaaacgtgccgggatgcgatacagcacacctataacgcatggctgaaagagttcggcacggggaacaaagagcaccagcagatcatcgagcagacggaggcgtttttaaatgcctatgggctgagtcgattcgcgccgctgggttatgacccgcgcgatttacccatccgtgatttagccgggtacaggaagaaggggaaccacgacggcgacccgataattttctacaccttcccggcagcgtttgagcaggagattgcaaagggcttcaataccaaacagtttgccgaagttctaaagaatgcaggaatgcttacacccccaacgagcgggcgaggttatcaggggcgggtaagggaaggagggcggcaaattcgcgtttatgtgctcaacttcatggatgaggaaagcagccagccagaagaataatcttttttcacatacgtagttttagtgttgtctcagttgtctttgttgtctcattttgtaatctgcattgatttataaggattttattttaatttctgagacaacatcgagacaacatttagccattttgagacaacatggcgaacgtgtgttttttaatctggcaggcagtgagacaacatttactcagggtgagacaacactaaattgcaaatgttgtctcactaaaatccagatgtggcgcggcctgtagagccgtgagacaacaaagacaactgagacaatactatttttgtttatatgcaaaaaaatctggcgaaggtgtcccacaataagacggcgccgggtaattttcattagcaaaactaataatcagaggtattcgcaaaatgacagcacagatatcagcatacgggcggctggtggcagatccccagaccagaacgacgaacagcggaacgagcatggcaatggcgcggctggcggtggcgctgccgtgcaatgcggcagataacggagaagctactttctggctgggcgttatcgcctttggtaaacaggccgacgcgctggcagggcacgttaaaggcgatttagtcagtgttgccggagcgatgcaggtcaatcagtggacgggcaaggatggcggtacacagcagggctatcagatagtggctgacagcgtgatcagtgcaaagacggtaaggccgggcgggaagcgtagcactgcgggaatgaataccagccagccggcgagccgaccgcagcagatcgcgccgggctgggaggtgtacgacactcctgatgactttgatcaacgccagccgtttgatgatgggttttaagctggaggacaagcagcatgatacgcgacaaaaaggccgaagaactggaggctaaagggttgttccgcagggcggcggcgcggtggcttgacgttatggcggcgtgtaccgaggatgccgacagggagcaggcgaagcggaaccgtgaaagatgccttgaaggcgtaaagcgcccacgctttaagctggaggaatttgcagaccttcacagagcggcaaaagccaccactaaccgcatggggatagcgcagaacaacggggaggctttcagattgccagccagcagaaaacgagcacgtaaggcgcgcaatgatggcgcataattccggtgccctggctgcgtgggagtttgagcatcacatgtagaatcatactgccccatgaaaatgcccatatcttatttataggcagaaacggtgtgttctggctatgtatggcagaaatggtgtgttctgcctataagggcagaaagcgctcgaaagtggtcgttgagaacgcgctgtagcgggagatagttaagcgcccaccagcccgcgcagaagttcacaaggcagcgaaagagacacagcgccgcatgggaatagctcagccgaatggtgaggcgttcaggttaaaaacaagacgatgaaagtgattgtattggattaatcttcttcgatgttacgataatactttatttacttttggggataagttgatgtcagtatggaacatcattgttttgatattcgctattatcatttatgttcttcccggcgttatagccagttcaagggagcataaaaacgctacggcaatatgggtgctaaatattgtcctgggctggagcttcttgggttggatagccgcgcttgtctggtctttcacaaaccccggagtggttaagcttgaaccacaggtgtttggcgcggattctgctggtggcggtttagtagacgatactaaaaaatgtccgtattgcgccgaaacaataaaaaaagaagcaatattgtgccgattttgtggcaaagatttataaatcgacatcgtcaagcaagggtggcatcaatgaaaattattatggtattaatttcatcacttttatttctcacggcatgtaagcctacagaagagaaagccatagagttggctaaaagcgagatatcgcacgacatgaaagatccatcatctacccagtttagagatgttgtgtcaaaaaaagttggtgaaaaggacgatggctctatcgcaatgcttgtctgtggtgaggtgaactcaaagaacagctttggggcatattcagggtactcgccttttgtcatcgcgctaacgatgaaatcaaagggttttttctcctccggcgtggtgtatgcagtcgaagggaaaacagttgatgaccgtccaacacgcaagaatagtgcaaatacgatcaacccctgcaagtaacaccacaccaaacccgtgaccacgggtttttttacgccacatcatttcacaaagcgcaatgcttgccatttatgttgcataaactacaatataaattgactgtataaatatcaggggtaagcagatgaaccgatcacaaatcacggtagcactttgccgggaacatcttcagtccattcgtgaaattcaggaagaggagcgcaagcgttctccgattggtgtagcaccaacggtaaacgctattgcccgcgcattggtcgctaagggccttgaatctgttaagcggggtgggtgatggaacaactacagaggctggctgaagtaattgccgagacctatattcgcgatctgcgccgggaaactggctccaacgttcttagcattgatggtgtaagtggcaacgttgaaaaacacctgctcgccgcggggcttgtcgataacacaatatatgccgctaaagatgaatatggcgcgacatttgaacgagaagcctatcgcatgttaatgaattttatatcatttgatggtccggaatatcgccttaccgaacatggtcgattagtcataactcttctgaacaccaacgctctgaaaaaaaacaaagtaagaaccctacactgaggcgctcatgacaactgattttggcaaatacaccattgagattgaagccgatgcggccaaactgctggcgggtcaggcgagcgcagattcagctttaaagcaaattgaaaactcagtcaaaaaaacagctaactctgctgacaagctagataaaagcctggataacttgggcggaggtttttcgcgccttgctgtggccgtgaaaggatacatatcaattcaggcgttgatgaagctccaacagctgtctgaggaattcacgctacttcaggcgcgagtaacgcgtttatcttcaagttcagaggaaggtgcgcggagctttcagcagcttgtgggtattgcttcggcaaccggtgccagccttggggataccgtcaacctctggcagcaactgaccgctacactaaaaactgtaggcgccactaacagtgatgttaaccggctagtgatgaccctgcagaagatcggcgctatcggtggctcatcggctcaggaaatggctaacgctctcaggcaatttatgcagtcggttgcgtccggcagaattcaggcggaagagtttaactcagtgctggaacagatgccggaactggcgaggcagatcgccgatggtatggggattccgtttaacgagctccgtcagttgatgctggcaggcaagttagatattggtgaggtgctagcggcaatcgaaaagaggtctgacgaaatcaatcagcagtttgaaactatgccgcgtactgtatcgcaggcaacaaatgctttgatcactcagttcggggtagctatctccaaaattgatgatgctattggggcgtcgcgctatttggcaaaacttctcgaccaaactgctctttcaatctccgtagccaccggaaatgtagatcctattgttgcgatagatgcgcagttggattcgctgaataaaaaattagctgtaactgaagcggcttacaataccgtttccaaagcttctatctacactgacgcaggcactaaaacacaaatagatgctatcaaaggtcaaatagcggccctagaacgagcaaaatccctttattccgatgttggcaaggcggcatcgggttctgtagacggatctaagccagcctatatcaccaatctcgaaaagaaaactgcagagaacaacgccaattcgatcattaaatctggtcaaacagtagttgataagctcacccagcagcgtgaacagctaagcaaagacaaggccaaagggctaatcgatgataagaaatatgctgaagctgctgctgttctggataagcaaattgccgacgccagaaaaaaacaggataaaacgccgaagaatgcctttgcccgcggcgatgactcaatagacaacttgcagcggcagattgccgttttgacaatgcgctatgacgagaacaccagagaggctgcgcagtttaatgccgtggccgctctcggagctaaggccaccgacacgcaaaaagagcgggtgcgcgaactggctggacagttatttgacgcccagcagcgccagaaagaccttaacgacgcgatcagcaatgaccctgtgcgtaaggaaaataaaacctattcagacggtcgagaccagctaaagcgccagctagacggccagatgattgaccagaaaacctataaccagcaatcagagttgatggagcagcagcatcaagtcaatctggcaaaaatacgcgctcaggagcaaacagcaaacccgatagcagccgcccgcgctgaaattgacccggtacagcaactggtcaatgaaaacaaccagaagctggccctcatgcagcagtaccagcagcaggaacaggcaatactccagcagagctatcagcagggaaaaatcagttacgatcagttcatcgctgccaaatcagctacggatgctcagtatctggcgctgagaacggcgcaggagaatcagttcaacgagcagatgacggcggcgcagtggcagttgttgagccagcagggacttggctggcagactttgaccagcgccgtggatgctttctccggcagcgcgtccaacgccattaccggaatgctgactggctcaatgagcgcgtctgaggcgatgaaatcgcttggaacgaccatcctcaacagtgttgttaactcgctggtgcaggcggcaattcaggcagctattgttaagccattgctggaagcgtttggtttatctgccgaaagcacgcttggggcaagtacggcatcggcggcagagtcctacgctgcatgggcgccagcggcaatagcggcttccattgccacgctgggcagtgcggcaggcgttggctttgctgcatattctggtgctacgttggctggcaaggctcttggcggacgtaaaaatggcgggccggtatcagctggtaatatctaccctgtaggtgaaggaaacctaccggaactcatgcagaccagcaaaggactgttcatgatccccggtgatggaggaaaggtattcagtaacaaggatgtgaatagcggctctccgactatacagaaggcatcaacagggaaagaatatctcccgacatcctccgcatcatccagccaggcagaaagccgcactgaacgaccgatacaggtcaacataacccttatcgaccagaccaccggcaatcagcacaacatcactggcactgaagctttccagcaaggtgacattgtgacagttactggatggctgaatgacgtagataccgccggcccaatgtctacagcattcgcagatgctcacggactaagaaggcaggcaaggggggctttttaaagttgacccgagggggagggttaatcgcctccccttttgttacgcgggactgctttatgaatggcattttcacaggacagaaataagaactttttttcgtgtaaacgcagccagtaaacaacctaccccatgagagggtgacaaaagttgacatcgaaaggcgatcccgtgactaacgacgaaaagcgaaaactataccgcgcgtgggctgatgatatcggcggcggaacatctttcccggacgcctgcagggatatgacgtgcggagcgacgaccaggaaagggacaccctgcaaaatgacggcgctgtatgcttctggccgctgtaagttacacggaggcatgagcaccggagcaaagacaccagagggtaaggcacggcagttagagggattccggcgctggctggagaaaaggcagcagaccaccagccagagtgatagtacgcagtaaagtttgcgtcgatggtgcgcagtacgcagagaggtacgcagcaaaaagaaggttttttcagtgcgtacttgtttaagcgtgttttgcgcgtggctctgtaagtcaatgattaggcttaattatagcgaagcgcgataatcgggggagcgaatatgggtattaaaggcaggggcatgaacaacattcgccgcaacatcaatgcgctggtgagggacatcacagggcggcgcttaccgcgtgcaatgacagccgccttgcatgaaggtgggctcgtagcagcaatctatacgccagttgataccagcaccctgattaactcgcagtttaaagaggttatcaccaacggaacgcgcatcactggccgaatcggatactctgcgaattatgcaatttatgttcaggatccgaacatcccgcagaaatttaccctccccagggccagaaaagagtttttgcagcatggtgttgctgatgctaaaccgcagatggaggcagctttcctgcgagaattatcaaaacgctgattgcggagaaaacgaaactgcttaccccatgagtggttaacaattgttaaggttatagcaacgattattaggccgtactcgaagtaaccaattgtgcagaactcatataatttcgtattcattagcgggtttttttagcggagatctgaactaatgagagagcagacgcgggtttacacctctgcgctaccacgaattaacctccagtttctggcagatatgcaaagaaagctggtggactcgagcccgaaaacacagattttttgtgataccaagagcggaagggtgtgtttctctctggttcctggcggctacagtgcgacaatcaacggggtaacgcgagttattggcatcacgattacccgggcagggtttggttaccggcgatggtacatttgcccgcattgtggtggccgggttgcgaaattattcattggccggaaggacgtagggtgtcgtaaatgctggagccttcactatgccagccagagtgaagatgaggtcgctcgcttacggcggagtgtgtggaagcagaggcatgacctatggggggatgattacccgcccgcgggcagcctgctaaatagcccgctcaagtttccgaagcctgccggcatgagatgggataccttcgagcaaaagcgctctcgactgctaaagactgaatcagcttactggcggttgaaagaaccgagggatgctaaagggttcgccagcgtaatgcgcagagctgaggcgtcaatgcgctcatttgaacgggcatcgaaaaaggctaccccatgagcgccctactattaccctaatgcctaccccataagcacagcaagactacggcaaggttaattccggttctgagccggaattagctaaaaacagccggttacctgccatatcaggagcgacaacgatgttagaccgcataacactggagttagccatacaggagatagccaggcagagcggtgaaacacttgataaccacgcccgctacaccattcgaaacggcgtggcgcaggtgctacaagccaaagaaagccaccgccgcaggatggtagcgccagcctaccagtggaagaagcccaccgcgccgcgcagataacattacagcgccgccgataacttctcagcattgcgcccctgatgcttccaggcgctgtaaatgtctttatcccacgccttacccgccttagtctgataacccgcctcattgagcctctcagcgataatgcgcccgttatcgaaaccctcccggatagtgtccgcgataatcccgatcaccgccgtttcattgtacggggtaggcgggatcccctgcttacctccggctagcgccgctgccgctacttccattcgctccaccagcgccagcatacgggactgagggttactctctggctggcttagtttgctgcgcagggcatcgactagccacgctgttctatcgccgcctgatgccgctacagcctgattaaatgcgtcctgcaattcagccggaacgcggaatgctaccagattggatttgctcatgagggccgccatatcagtgttttctgtctgtacagtatatcactgtataacgctgttatacggttgggttgctggctggtttgtcatttttgatgtccacgctaacttttgacgcgccgtgctggtggtcatgaattttggaatgctttggaaatttgaaaactaccgacaaccaaaagagccgctagagtgatggtttaaggctgaatacttagcggaggcatccaaaaagatgagtgctaaatttgtactgtttgatacggatttggattgtgctgattggcaaacatgcgtcgtggttggcgctgcatactttaggggcgatcgggtgtattaaatttgccaggccgtacatgcgggggaatctcggatgtaagaggtagggacaaagtaacggtgagctactcagttgctggattaaagggcagaattctgcccttagtgctgagtggtagcgttatgggttaaccaagccgcacacactcgcctgatatcgaattatcagcgccgcatgtatcacgtattagccggcatgttcccggcaggccataacgcgtgacattacaccagacgccgggagaatccgcgctactctgcgtggtgttttgccgttgctcgtataccgtcaccctttccagcaggccaccagctaccatgttttcgagagtgcgccgggttgattcgagctggtggcgcttgtcgaacgactccatgccatgaagcagataagccacgccggacacatcgagagggggcgcaccaatctcacccgtcacccattctaggttatccggctcaaagtagctgagtatcttttttttacggctggtcattctcatggctggctgattccttattgtgggatagaggtatcatacaataagagcgacggggcaaggttgctgcaagggtgaaaaccgaccaaaagaccgagcgcctcaaaaaaccgtgtacacatgggtgtacataatgagaatcagcattacaagaaactcagtaacggcgcggcattgagccacctactcaataaacagatccaatatcgagtaacgctttctcgtttgttaatgtatttcggtatccagggccatgataaatcatggcctttttatttatctctctcacgggcgaatgataagaatctacttataaaaaatagtcgtccagttttcggttgtggcaaataagcacaacgcggcacagtcaggaaaacactaccgcgagagaaaagaatggactttaatgcgcttcaccagcaacaccaacctttgttgcttgccaatgtctgggatgccagcagcgctcaggctgctcagcaggctggttatcaggcgctgggatcctccagcgctgctatcgccgcaatgttagggtatgaagatggcgaagagatgagttttgacgagctgttttatgtcgtctcacgcatcaaaaccgttagcgaactgccgttaagcgtcgatttagagacgggctacggcgcgacaaccagccacatcattgacaatatccggcgtctggcgcatctcggcgtgagtggaataaatctcgaggatagtcatgtggtggatggtacgcgtcgtcttgacgatgcggagcgctttgccgtcaaactgcaggaaataacccgcgcctgtcccggtctgtttgttaatgtccgcaccgatacctttcttctcaacgtacaagatgcgctggttcagacgctctatcgcggtcaactctacgccaaacacggcgcatgcggtttttttgtgccttgcgtcacccgcgcggaggatattatcgccatcgttcaccacgtgcgtttacccttaaacgtaatgtgtatgcctgagctggctgacttcagcaccttatcgacactgggcgtaaaacgaatttcgatgggcaattttatttatgctgcgacgcaggccagactgaaagacttattatgtcaggtgcaaacccaacactctttctcaggtgttttttgaccatgaaaattaccgacagcatgcagtgcgatatctggtatcaggcgctgcttgaacgcgcggtggaattcaccggcgtttttttcgtcggcgtgaaaaccaccggcgtattttgtatctcggtctgtcgggcgcgaaaaccccggcgggaaaacgtcgaattttataatgactttaaatccgcgctggatgccggcttccggccatgcaaagtctgtcgcccgacggagaatgcccggacggcccccgcctttgttgaacaagcgctccgcctgctgcgagaagctccaaaggtccgcctcagcgatagcgagctacgtcagcacgatattagcccggaacgcgttcgccgctggttcctgcaaaaccacgggatcacctttcaggcttttcaacggatgcagcgtttgaatatggcgcttcaggaattaaaagcaggccgctcaactaccgatgtcgctttcgatagcggttacgagtccttaagcggcttcggctatacctgcaaaaaattgaccggtttcgcacccagcgcacaacgccaggttgttttaattcatcgttttaccaccccgttagggccaatgtttgtttgtgcaacgcaacggggaatttgtctgctggagtttgtcgacagacgagcgctggagtcagaattcagcgacctgcagcggcggttcaacgccagcatcatcacaggtgaaaatgcccacaccaggcaggcgcaacaggaaataacggagtatttcgccggacagcgtcaatcgttcgaggtggcgcttgatgccccaggcagcgagttccagcgagcggtctggcgccgtttacagcacgttagcttcggtgagacgacgcattatcaatcgattgcgatggagataggtaaaccaacggccacgcgcgcggtggctgctgcaaacggcgctaaccgcgtcgcgattatcatcccgtgccatcgaattatcggcaaagatggttcgatgaccggttacggcggcggcattgcacgaaaaatatggcttattaaccatgaggcaaccatcagggaaaaacgcggctgattttactttcaggatcaacgggcccctccctggctttcaccgcgtctcggtaagcctattttttatccagcacccggcaggttaaaaacgcccctgccgcgcacagcagcgccggagccagatagctgtgatccatgtgggtaaactccatcaccagcgccactgcggtcaacggcatctgcatggaggcggcgagaaacgcggccgcccccaccacagcgaagctgcttttatcaccgccagggaagccgagctgccagagcgcgcagagcagcaggctgaccaatccgcccaccgccagccctggggttaacaatccaccctccgcgccgccgcgcagcaccgccagaatcaccaccatcttcaatactaacaggacagcgaccatggagagaggcagcccgtcgctgagcgccagctgcattggacccttgccattgcccggaagctcggggaaataaagactcaggatggcaagaagagaaaaccccagcagacagaacaccggcatctgccagttacttcgcgcgcgtgaacgcgccgcgctggtcgctttgcgaaagagccaggcgccggtgccaagaatcgggcccgccagaatcgcccaccagagaaaggtgtgcggaagtgcgctggaaacaaaatggtattgcgattcatcccctaaccccagggtggccgtccaggcggcaatcgccgaggtcatcatcgccgccagcgttttttcccagctaaacgacagcagcatgacctcaaggctgaacaacgccccggccagcgggacgttatagaccgccgccagacctgcgcccgccccacaggcaatcagcgtgcgggtttcatcttccagcaggcgcagcttacgcgccaccatccccgccccagcgcgcccatttcccggggcgccacctcgcggccaagcggggagcccagcgctacggtgacgatctgcagcagcgcgtggatcgtcgtggtgcccgcgggcatgggtgcgcaggggttggccaccgccgccgcaatagaaacccgcctccgcccgtagcgaccaagcagccaccagccaaatccggcgacggcgccgccggccacgattgccacgatgcggcgtggccaggacgactccgtgacgccctgtaaaaatgacaccgaaccgacgatctgcccataactgtaaccaaaagccaggtgctgaatcgcgtgtaaaatcagtgccaaaaccatgccggacagaccggccagaatcccggttaataccacggctatcaggcggatcagatgatttttattcccggcggcgacgctcattttctcaggccttgaaaaggaaaaataaaagaataaaggacgagacctaaacattgcgtaatcatagtgttttcgatagtgatacccatcgcttcacttagcattactttttctaatcaataaaaatccctaaaaaatcaataaacctttaaatcaagccatcacagatactatttccattaatttttcctggcgtaaatgattcgctttagaaaatctcaatcgtgatcctgcgcacaaatcgttaacctgcccgccattacctggggggatctatgctgcttcatgttctgtacttaatcggtatcaccgcggaagccatgaccggcgcactggctgccgggcgccggcggatggatacgtttggcgtcatcattatcgccactgcgaccgcgctgggcgggggttccgttcgcgatatcctgctggggcactatcctcttggttgggtgaagcatcccgaatatgtcatcattgtcgccgtcgccgctgtcctcacgaccattgccgctccggtgatgccgcaccttcgtcggctgtttctggtgctggacgcgctggggctgatcgtgttttccatcatcggcgcgcagatcgccctggacatgggcgaaggcccggttatcgcctctattgccgccgtgatcaccggtgtcttcggcggcgtactgcgcgatatgttctgcaaacgcattccgctggtcttccagaaagagctgtatgccgggatctcctttgccgcagccgtactctatattgctctgcaacattacgtcagcagccacgatgtggtggtgctggctacactgctgttcggctttaccgcccgcatgctggcgctacgctggaaactggggctaccggtcttccactacacccatgacgcccactaaccgccttaaaatccggggatgcgctgcccgctaagccattgcgccagcgccaccacgtccggatggtgcaggaaagccaccagctggcgggctctgatctcccccacgcccggcagcgtgcgccattgcgcttcactttttgccgccagcaaatgccagttctcgctttcgagctgcgccagcgccccctgcggcaccgggatccccatcgccagcacccagcggataaaaggtcgtttgcgaacgagatcaaactgatgccagaggtgctgcccgcgggcggcggaaatccctggcaccgcctgcagctgctcaacggtaagcgccagccaggaaaagatatgcgtcatcgggttttgctgctgaatgacgcgccataaattttcccccacgccatcgacattcagggcggactttgatgacaaccagatcagcctggaaagaaactgttcgctgcactcaggggtggcgaaatagcaggttagcgcattaaatttcgccggcggcggcgtcggtttatggcgctcggccgtccgccagacgacggcgtcgacccgaggaataccctgccctgccagactgatctgcagctgatcgccaaccccaatatccagcatctgccagcgggacacagagccaacgttaacccgctgcacgcgtttatcatccagccgctgggcctcaagctcggccaccacgttgagtctgccgctgcggccggtactgaaacggatcgcccgtacctgcatcacccgcgatgccggaggatatttccaggctgccagccactcgccctttccgggcgaccagactcgccccggcggctcgcgtccttcgcgcacaatcacaccgtcgctgacgaagggcagcggcgagcgataccagcgctggcgccactgcgccacctgctcgatgcgcgacaccggatgggtatattgtccgctgtacttaaaccccgcctgcgccagcagctgctgacgacggcgcatatccgacgggccgtctggccaggcccagataaaaacgtccagttgactgagcgccgccgccgcgtcggctcgcatcatcaacccggcgactttcgcccgcgcgttcatccccccagcctgctgctgaacatggccgtcccggcgcagaaacagctcccctgcagtacgctgtcggccagttcaccggtcatcactttctccagcgctgggatctgccgggctcgggcggtccatgcctcaccgcgcagaccatcgccgcggctaatggcctgaaccagacgcccctggcgataaacgagagtcaccgccacgccgtccactttaggctgtatccacaggtcggatttatttttcatccagcgggcaacgctgtcctcatccgccagcttgcgcacgccggtatgggccaccggatgacgcgcatcgccggtgggcggaggcagatcgtcatcctcaggcgtcgcgcccggaaagcattgtcgccactgcgccaggcgcagggtgagctggtcgtaaacgtcatcgctcactccgctggcgccctgccgccagtaagcctctttccaggcgacaatttgctgatgaaggcgtgatgtctcctgccttcctctggccggcggccagtccggacacgtcgccagcgcgctggcagagaacatccctaacgccagccaccaccctcctttacgcattgcagtcccctcctccatcacctcgcggagagtctgctgcagaatgccgcgagccgcgacggaagctttttcgccttgcgaagcgccttccaggatttacgcctcattgcagcaacggctggcgaattcaggaaaacggcaggcaaaatgaaagaaacagcggcaaaaagtgtgacaatgactgcgtcacgccgcggcgacgtgtataataggctcgtatgtaggacctctttcgataaccacatacaaaagacactcatggctcaaggcacgctttatattgtttccgcccctagcggcgcgggtaaatccagcctgattcaggctttattaaaaacccaaccgttgtatgacacccaggtatcggtctcccataccacgcgggcgccgcgtccgggtgaagtgcacggcgaacactatttcttcgtgaatcacgacgaattccgctcgatgattggcgaaaacgcgtttctggaacatgcagaggtctttggcaactattacggcacgtcgcgtaaagcgatcgagcaggtgctggcgaccggcgtcgatgtcttcctcgatatcgactggcaaggcgcgcagcagatccgtaaaagcatgcccggcgcgcgcagtatttttattctgccgccgtcaaaagatgaactggaccgtcgcctgcgcggccgcggccaggacagcgaagaggtgatcgcgaaacggatggcccaggccgttgcggaaatgagccattacgcggaatatgattacctgattgtgaacgatgattttgacaccgccctgagcgacctgaaaaatatcatccgcgctgaacgtctgcgcatgagccgccaaaagcagcgacatggcgctttaatcaccaaactattggcagactgaacccacattcagtatcatgcccagtcatttcttcacctgtggagcattttaagtatggcacgcgtaactgttcaggacgctgtagagaaaattggtaaccgttttgacctggtactggtcgccgcgcgtcgcgctcgtcagatgcaggttggcggaaaggatccgctggtaccggaagaaaacgataaaaccaccgttatcgcactgcgcgaaatcgaagaaggtctgatcaacaaccagatcctcgacgtacgtgagcgccaggaacagcaagagcaggaagccgctgaattacaagccgttaccgcgattgctgaaggtcgtcgttaatcacacagcgggtcgcccttgtatctgtttgaaagcctgaatcagctgattcaaaactacctgccggaagaccagattaagcgtctgcggcaggcgtatctcgttgcacgtgacgctcacgagggtcagacacgttcaagcggtgaaccctatatcacgcacccggtcgcggtagcctgcattctggccgagatgaagctcgactatgaaacgctgatggccgcgctgctgcatgatgtgattgaagatacccccgccacctaccaggacatggaacagctttttggtaaaagcgtcgccgagctggtagaggggtgtcgaaacttgataagctcaagttccgcgataagaaagaggcgcaggccgaaaactttcgcaaaatgatcatggcgatggtgcaggacatccgcgtcatcctcatcaagcttgccgaccgcacccacaacatgcgtactctgggctcgctgcgcccggataaacgccgacgcatcgcccgcgaaaccctggaaatttacagcccgctggcgcaccgtttaggcatccatcacatcaaaaccgagctcgaagagctgggctttgaagcactgtaccctaatcgctaccgcgtcattaaagaggtggtcaaagcggcgcgcggcaaccgtaaggagatgattcaaaagatcctctccgaaatcgaagggcgtttgcaggaagcggggatcccctgccgcgtcagcggtcgcgagaagcatctatactccatctactgtaaaatggtgctcaaagagcaacgttttcactcgatcatggatatctacgccttccgcgttatcgtccatgatgccgatatctgctatcgcgtgctcggccagatgcacagcctctacaaaccgcgtccaggtcgtttcaaagattacatcgccattccgaaagcgaacggctatcagtctttgcatacctcgatgatcggcccccacggcgtcccggtcgaggtacaaattcgtaccgaagacatggaccagatggcggagatgggggtagcggcgcactgggcttataaagagcacggcggcgaaagcagcaccaccgcgcaaatccgcgctcagcgctggatgcaaagcctgctggagctgcagcagagcgccggtagctcgtttgaatttatcgagagcgtaaaatccgatctgttccccgatgagatttacgttttcaccccggaagggcgcattgtcgaactgcctgccggcgccacgccggtggacttcgcctacgcggtgcataccgatatcggtcatgcctgcgtcggcgcgcgcgtcgaccgtcagccctatccgctgtcgcagccgctctccagcggtcagactgtcgaaattatcaccgcgccgggcgctcgcccgaacgccgcctggctgaactttgtcgtcagttcgaaagcgcgcgccaagatccgtcagctgctgaaaaaccttaagcgcgacgattcggtcagccttggccgtcgtctgctcaatcacgcgctgggcggaagccgcaaactcgccgagatcccaccggagaatatccagcgcgaactcgatcgcatgaagctggcctcgcttgacgatctgctggcggaaatcggtctgggcaacgccatgagcgtcgtggtggcaaaaaacctgcagcagggcgaagccgctgcggcgccggtgccggccaacgcgtcgaaccacggtcatctgccaatcaaaggcgccgatggcgtgttgatcaccttcgccaagtgctgtcgtccaattccaggtgacccgattatcgcccacgtcagcccgggtaaagggctggttatccaccatgaatcctgtcgtaacattcgcggctaccagaaagagccggagaaatttatggcggttgagtgggataaagagaccgctcaggagttcatcaccgaaatcaaggtggacatgtttaaccaccagggcgcgctggctaacctgacggcggcgatcaacaccgcgtcttccaatatccagagcctgaatacggaagagaaagatggccgcgtatacagcgcctttatccgcctgaccgcgcgcgaccgcgtgcatctggcgaatatcatgcgcaaaatccgcgtcatgccggacgtgattaaagtcacccgtaaccgaaactagctttatgaactcaaagcgctacgagcgtatctgcgagatgctcgccaggcgtcagcctgacctgacggtctgcatggagcaggtccataagcctcataacgtctctgcggtcatccggaccgcagatgccgttggcgtacacgaagtgcatgccgtctggccgagcagccggatgcgtaccatggcctccgccgccgcgggcagcaacagctgggtgcaggttaaaacccaccgcactatcgcagatgccgtcggccacctgaaaggccagggcatgcaaattctcgccactcacctttccgacaaagccatcgattttcgtgaaatcgactatacgcgtccaacctgcatcctgatgggtcaggaaaaaaccggcatcacccaggaagcgctggcgctggccgatcaggacatcattatcccgatgatcggcatggtgcagtcgctgaacgtctccgtcgcctcggcgctgatcctttacgaggcgcagcgccagcggcagaatgccgggatgtaccaacgcgccaacagcatgctgccgccacaagagcagcagcgcctgctgttcgaaggcggctatccggtgctggcccgcgtcgccagacaaaaaggtctgccttacccccacgttaacgagcagggcgaagtggaagccgatgccgcgtggtgggctaccatgcaggctgcgaggtaaacccaatgtcaggccgcctgttagatgccgttccgctcagttcactcaccggtgtgggcgctgcgcagagcagcaaactggcgaagattggcctgcatacggtacaggatctgctgctgcacctgcctttacgctacgaagatcgcacccatctttacccgatagccgagctacttcccggagtttatgccaccgtggaaggtgaagtgctcaacagcaatatcaccttcggcggccggcggatgatgacctgccagatcagcgacggcaccggcatcctcaccatgcgctttttcaacttcaacgcggcgatgaaaaacagcctcgcgaccggtcgtcgggtactggcctacggtgaagccaaacgcgggaagtacggcgccgagatgatccacccggaatatcgcgtccagggcgatatgagtactccggagctgcaggaaacgttaaccccagtctatccgaccaccgaaggcatcaagcaggcgaccctgcgcaagctcaccgatcaggcgcttgagctcctggaaacctgcgcgattagcgaactcctgccgccggagctggcgcaggggatgatgagcctgccggaggcgctgcgtacgctgcaccgcccgcctccctccttgcaacttagcgagctggaaagcggcaagcacccggcgcagcagcgtctgattctggaagagctgctggcgcataacctcagcatgctggcgctgcgggcaggcgcccagcgctatcacgccctgccgctcggcgccaacgataccctgaaaaaccaactgctggcctccctgccctttaagcccaccggcgcgcaggcgcgggttaccgccgagattgaacacgatatggcgctggacgtgccgatgatgcgcctggtgcagggcgacgttggctccggtaaaacgctggtcgctgccctggccgccttgcgcgctatcgtccacggcaaacaggtggcgctgatggcgcccaccgaactgcttgccgagcagcatgccaataacttccgcaactggttcgaaccgctgggcatagaagtcggctggctggcgggcaaacagaaaggcaaagcccgtcaggcgcagcaggaggctatcgccagcggcgaggtgcagatgattgtcggcacccacgccatcttccaggagcaggtgcagtttaacggcctggcgctggtgattattgacgaacagcaccgcttcggcgtgcatcagcggctggcgctgtgggagaaaggtcagcagcaggggttccacccgcatcagctgatcatgaccgccacgccgatcccccgcaccctggcgatgaccgcctacgccgatctggacacctcgattatcgacgagctgccgccaggccgaactccggtgaccaccgtcgccatccccgacacccggcgcagcgatattatcgaccgcgtgcgcaacgcctgtacccatgaaggtcgccaggcctattgggtctgtacgctgattgaagagtccgatctgctggaagcccaggcggcggaagccacctgggaagagctcaaactggcgctgccggagctcaatatcggcctcgtccacgggcggatgaaaccggcggagaagcaggcggtgatgctggccttcaagcagggcgagatgcatctgctggtagccaccacggtgattgaagtcggcgtcgacgtgcctaactcaagcctgatgattatcgaaaacccggaacgtctgggtctggcgcagctgcaccagctcagagggcgcgtcgggcgcggcgcagtcgcttcccactgcgtgctactctataaatcgccgctctccaaaacggcgcagaaacgtctgcaggtcctgcgcgacagcaacgatggtttcgtcattgcccagaaagacctcgaaattcgcggtcccggcgagctgctcggcacccgccagaccggcaacgccgaatttaaagtggcggacttactgcgcgatcaggcgatgatccccgatgtccagcgcattgctcgccacattcatgaacgctatccgctgcaggcccaggcgcttatcgagcgctggatgccggaaaccgaacgctattccaacgcgtagcgcgcttttgccgcgctgcgggcaatttttctacacaacgagtggattatgaaacgagaactggccatcgaattttcgcgtgtcaccgaagccgccgcgctggcgggctataaatggctgggccgcggcgataagaataccgccgacggcgcagcggttaacgccatgcgcattatgcttaacctcgtcaatatcgacggcaccatcgtcatcggcgagggcgaaatcgatgaagcgccgatgctctatatcggcgaaaaagtgggtaccggcaagggcgatgcggtagatatcgccgtcgatcccatcgaaggcacccgcatgacggcgatgggccaggccaacgccctggcggtgatggcggtcggcgataagggcagcttcctcaacgcgccggatatgtatatggaaaagctgatcgtcggcccgggcgctaaaggcgctatcgaccttaatctgccgctggaagagaacctgcacaatatcgcccgcgccctgaacaagccgctgggcgagctgaccgtcaccgtgctggcgaaaccgcgccacgacgcggtcattgcccagctgcagcagctgggcgtgcgcgtgttcgctattcccgatggcgacgtcgcggcctctattctcacctgcatgccggatagcgaagtcgacgtactgtacggcatcggcggcgcgccggaaggggtggtttccgccgcggtgatccgcgccctcgacggggatatgcaggggcgcctgctggctcgccaccacgtgaagggcgataacgaagagaaccgccgcatcggtgaaaatgagctggcgcgctgcaaaaccatgggcattgaagcgggcaaagtgctgcgtctggatgaaatggcgcgcagcgataacgtcgtcttctccgccaccgggatcaccaaaggcgatctgctggacggcatcacccgcaagggcaacatggccaccaccgagacgctgctgatccgcggcaagtcgcgcactatccgtcgtatccagtcgattcattacctcgaccgtaaagatccagacattcagcagcacatcctgtaataccgctttttctctcccaggcaaccgtccgcaggcggttgccctgttcttcgtttatatttgatcaatagagctttcttgcgccttcggggtggaaatctggctcgtctggaccgaagataaggcatcgcttggcaacaggagaagacgatggcggactgggttagcggcaaagtgacaaaagtggagtactggacggacgccttgttcagtttatacgtgcgggcgcctgttcatccgtttaccgccgggcaatttaccaagctcgggctggaaatcgacggcgaacgcgtgcagcgcgcctactcctacgtcaacgcccccggcaatcccgacctcgagttctatttggtcaccgtcccggaaggcaagctgagcccgcgtctggcggcgctgaagccgggcgatgaagtcctggtggtgagtgaagcggcaggtttcttcgtcctcgaggaagtaccggattgcgataccctgtggatgctggcgaccggcactgccctcgggccgtacctgtcaattttgcaggaaggcaaggaccttgagcgctttaataacctggtgctggtccacgccgtccgctacgccgcggacctgagctatctgccgctaatgcgcgaactggagcagcgctatgccggcaaactccgtattcagacggtggtcagccgcgaaaccgtggaaggctcgctgaccggccgggtgccgtttctgattgaaaccggcgcgctggaagaggccgtcggcctgccgatgaccactgacaccagccatgtgatgctgtgcggcaacccgcaaatggtgcgcgatacccaacagctgttaaaagagacccggcagatgaccaaacatctgcgtcgccggccgggccatatgacggcggagcactactggtaatcaggcgtccgctttccagcgcacgtcctgggtctccttgccgaacttattctcgccctgggtgccgacaaacgcccccaggtcgatcagcatcatgacgataatcagcgtcggcacaaagcgcccgacgccccactgccagacctgcggcaacatcgcccagttccccgccagcagcatccacgccagaaccatcagcagcgcccacagcccggatttgccgcgatcgtgcagccgcttgaccaccaccgccgccgtcggccacagcaggcagacgataataaacgccgccgtctgcaggttgagcagattgctgcctgccagggtaaacagggcgctcatggtcaccagccagatggcaatccagatccagaaatcgcggcggccaatgcgccctttaattgagaataaccactgctgtagggtcatgcgtttttccttatcatcatcgtctgcgtagtttaccctggcgtcgtgactttttgacaagcgccgcgcttcccgatttaatcgtcagcaggcaaaaaaaggaacgacgggcatgaagaagtggacaattttgtggttaagtgggctgatgggccttgccgtcggcccgcacgcgttgtccgcagagagcgaatcgacgaccgcggcagcgccctacctgctcgccggcgcgccgagctttgaccagtcgatcagtcagttccgcgagaaattcaacgccgataacccaaagctgcctctgaacgaattccgttccatcgccaccagtcgcgatcgggctaacctgacccgcgccgccagcaaaattaacgaaaatctctatgcctccaccgcgctggagcgcggcacgctgaagatcaaatccatgcagatcacctggctgccgatccaggggccggagcaaaaggcggccaggaccaaagcgctggagtatatgagcgccatgatccgcgccttcgtgccgacttttagccaggcgcaaagccagcaaaaactgcagaaactgctggccgccggcaagggcaagcgctacttcgccgataccgaaggcgccgtgcgctatgtggtggcagatcatggggaaaagggcctgaccttcgccattgaaccgattaagctggcgctatctgaaacgctggaaggtaacaataaatgacaaaaagcaaagcctttccagtgacgagtctctatactgtttcacagaccatgctgccctctggggcggctatattccttaattcgcttaagtagcgtggagaattaaaatgcgacatcctttagtgatgggtaactggaaactgaacggcagccgccacatggtaaacgaactggttgcgaacctgcgtaccgagctggctggcgtaagcggctgtgcagttgccatcgccccgccggaaatgtatctggacctggctaagcgcgcggcagaaggcagccacattcacctgggcgcgcagaacgttgacgtgaatctgtccggcgcattcaccggtgaaacctccgccgaaatgctgaaagatatcggcgcgcagtacatcatcatcggccactccgagcgtcgtacctaccacaaagaatccgacgagctgatcgcgaagaaattcgccgtgctgaaagagcagggtctgaccccggttctgtgcatcggtgaaaccgaagccgaaaacgaagcgggcaaaacggaagaagtttgcgcgcgtcagatcgacgccgtgctgaaaacccagggcgctgccgctttcgaaggcgtggttatcgcttacgaaccagtatgggctatcggtaccggcaaatcagcgaccccggctcaggcgcaggcggtgcacaaattcatccgtgaccacattgctaaagctgacgccaaaatcgctgagcaagtgatcatccagtacggcggttccgttaacgctggcaacgccgcagagctgttcacccagccggacatcgacggcgcgctggttggcggcgcctccctgaaagctgacgctttcgcggtgatcgttaaagcagcagaagcagcgaaaaaagcgtaattcgcttttcccggtggcgacacgcgaccgggttgactgacaaaacgtgggagcccggcctagcacagcgcaagccgggctttcttttgccgttacagtttccccaacagctgataccaggcgtagtccagcggcagtaaaatcagataactcaccgccgccagcgccagacacagttgcatccccgccctcgccgggaccttgcctaaccccatcgccaccacgatcggcgacgcctgatagggcagcagcggcgtggaatagcccagcacctgaatcataatcacgcttagcagcggaaaaccggtggcgtcggcaaagctctgggcaaaggtggtatacagcgccggcacgccgttggcggtcataataaagttcagcgcgctggttatcccggtcagggcgagaaagctggtgaaaggattgtctttatccaggggcatcacctgcagcagcgcattgcccactgcgccgccaatcccggtttgggtgacggcgatcgctagccccagaatcccggcgacgtaaatgcaggtgcgcatattcaccccgctggcaaactcctcgccgttaataaagcccacccgcggcagcagcgtgatcacagccgccgccaggccggtccacgccgggccgacgccgtgccagctctcggtcacccatagcgagaggaccaccgccagcagccacgccagacgtttctcgtcgcggctcatcggcggcagcggcgccaggtcgcgcggtggatgcggcttgccgggaaacagccagcaaatcagcgccaccagcaccgcccctttcagccagccaagcaccggcgtatgcagcagtaaatagggaacataattcagatggataccgtacgagccttccgccgcgccactcatcaccagattcggcacgttggcgggcaaaatcgttgccgacagctgaaaggtgccgaaccccaccgccagcgccaggccgaaccagccgcggctgccgtcggcaatgcccgcgcggcgggccatcgccgccacgatcggcatcagcagcgcgatgcgccccatgttggagggcatcacgaacgccagggcgtagctcaggagtaccacgctggcgaccatccgcggccaggagtcggtgagcctggccgacagcgcctgcgccgcccggtccgccagtccggttttacggatggcgatgccgagcacaaagccgctgaacaccagccagaacgccgaagaggcaaagccgccgaagatcacctccggcggagcgattttcgccatcattgccgctgcgaagaacagcagcgcggtgataaattccggcagcagcgacgtcgcccagagcacgatggtgacgccgacaatcaatgaaggaaggaacagcgggtgggtaagccagagcgacatgcctgtctcctgtcgtttttttcagcaagaatacgacgacaggtaagacaggtaaacgccagaactagtggtttgcgttaaggatggcgcagcgatgatcctgaatttcttccgctgaagcccggttcagggtcagcaggttacgctccgtcgcaagcagcaccagcgagccgtcgctctgttgcgccattgccagcgcgaagcgtcccatatgttcacgcgcctccggcacctcttccgccagcatcaggaacgggctacgctgggccagctccgcctccgtcacccgtcgcgccaggtattcgtggccctgaagcccgcccggtagcggcagccagcggctgctgatcgctgcggcatccttatctaactgcgcgcgcacatcggggcgcaggcaggagatatgaatatggaaatggttttgcgtacgtccactgcgcgagttgatcgccagcgataccgcgttatcaggaaccggcgcgccgtggcgctggctcatgatttcacgcccctgccaggcctgccagaaaaagttcggcgtcaacggatccagcagcagcgggctttcggtgccgttgatgcggtaggtcggcatcagcaaatactgcagcgggccgttacggtctttaaacagcacatagccgcccttgaggttcacttccgcgcacggcgacgggttttgctgctgttgctgatggggtacgcactgctgcaggacaatcttgcgtaatgcgtccgggttgccagagtgcagccagtagtagccgcccgccagcgccgcgaggatcgccaccagcagcgccagcaaaaagtatcttactcttctcattttcattccctgttaagcctgaagcggaagagtagcgtaatttgatgactaaatgaaaacagatggtggacggggcgttatcccgggtagcggctgatgccttacccgggctacgcaccgcgcaaaactgtagccctgctaagcgtagcgcaagcagggacaagagaattaacgctggctaatctggtcgaaggtgccgccgttggagaagtgctctttctgcgctttcgtccagccgccgaactcctgatcgatggtaaacagcttcagtttcgggaattcgttagcatatttcttcgccacattcggatcgcgcgggcggtagaagttcttcgccgcaatctcctggccttccggcgagtagagatacttcaggtacgcttccgccacctgacgcgtgcctttcttatccaccactttgtcgaccaccgagacggtcggctcagccagaatcgactcacttggggtcacgatttcaaacttgtctttgcccagttcgttggtcgccagcagcgcttcgttttcccaggcgatcagtacgtcgccgatgccgcgttctacgaaggtattggtcgaaccgcgcgcgccggagtccagcacttccacgtttttatacagcgccttgacgaattcctgggctttcgcctggtcgccgtgattctgatgcagggcatagccccaggccgccaggtagttccagcgggcgccgccggagcttttcgggttcggggtaatgaccgacacgcccggtttgatcagatcgttccagtcatggatctgtttcggattgcccttgcggacgaggaacacgatggtggaggtatacggcgcagagttatccggcaggcgtttcagccagtttttatcgatgcggccgcgttcagcaatagcgtcgacatcgtaggccagcgccagcgtgaccacatccgcttcaataccgttaatcaccgaggtcgcctgtttgccagagccaccatgcgactggcggatcaccacgttgtcgccggtctcctgcttccagtgtgcgctaaacgctttgttgtactgttcgtacagctcgcgcgttggatcataagatacgtttaatagctgaatgtcttttgccagaacgctggcggatgccagcaacagagttaaccctacgccccacttattcatcgcaccgctctctttatgtgtgttgtgatgggttaagcgtgccagaaagcgattcaatgattaaagaataaaaaaagattggctataacttgcggatataaagacgcgagtaaggatgaccccctcccgggcgggagagggcgcgaagcgattagacttcttccatgcgacccagcagcgcctgcagacgttcctgccagccctgctgctgctctttcagctggctgttttcgcgctccagctcttcacgaccatgctgcgcgctctgaacttcctgcaccagggtgttgttcttttctttcagctcttcgatttccatctgcaacagagtgatggtatcaatcgcctgctgaaccttagattctaatttctcaaacacttctaatgacatcgtcatacctctcctgaacttgcaaggcgttgatagaaactcgtgtttcgtatacgcggtcccgccttaacgaaaattagcgcacatagcggtgttatcgtcgattgtatgaatccccgccgcccctgtccagcggcaagccgcgtagattgcggtttgcaacacttttcagtctttacctggtgctttcagcgcagttcgctcgtagttcatgggtcaatgttaattttatggttaacaaaatgcgtggtgaaacgctccggcagcgctctcaatgcgcgcaaatggcgcgaaaacgctcattttcttgacgaggcacacacatttgaagttcgatatttctcgtttttgctcgttaacgataaattaacactatgcctacatggcaatatggtcgtctgtgaccaccctacatacaataatcatcaccacgcttcaggattcgattatgagccaaacatcaaccttaaaaggccagtgcatcgcagagttcctcggtaccgggttgttgatctttttcggcgttgggtgcgtggctgcgctcaaggtcgcgggagccagcttcggacaatgggaaatcagcatcatctggggtctgggcgtcgccatggcgatctacctgaccgccggggtctccggtgcgcaccttaacccagcggtgactatcgcgctgtggctgttcgcctgcttcgaaggccgcaaagtggttccttttattatttcgcaattcgctggcgccttttgcgctgcggcattagtttacgggctttactacaatcttttcctcgattatgaaaccacccaccatatgattcgcggcagcgtggaaagcctcgatctggccggcattttctccacttacccgaacccgcacatcaattttgtgcaggccttcgcggtagagatggtgattaccgctatcctgatgggcgtcatcctggcgctgaccgacgatggcaacggcataccgcgcggcccgctggcccctctgctgattggcctgctgattgcggtgattggcgcctccatgggaccgctgaccggcttcgccatgaacccggcgcgtgacatcggcccgaaagccttcgcctggctggcggggtggggtgacgtcgccttcaccggcggcaaagatattccttatttcctggtgccgctgtgcgcaccggtggtcggcgcggcgctgggcgcattcagctatcgtaagctgattggccgtcacctgccttgcgacacctgcgtggaggaagagcaacagagcccctcctcttccaccgctcaacataaagcttcgctgtaatctgactacgggacaccgactatgaccgacaaaaaatatatcgttgcgcttgaccagggcactaccagctcccgggccgttgtgatggatcatgatgccaatatcgtcagcgtctcccagcgagaatttgaacagatttatcctaagccaggctgggtcgaacacgacccgatggaaatctgggcttcccaaagctcgacgctggtcgaagcgctggccaaagcggatatcaactccgatcagatcgcggccatcggcatcaccaatcagcgtgagaccgtggtggtgtgggagcgagagaccggtaaacccatctacaacgctatcgtctggcagtgccgccgtaccgcggagatctgcgagcagctcaagcgtgacgggatggaagagtatatccgcaaggccacaggcctggtggtggacccgtacttctccggcaccaaggtgaaatggatcctcgaccatgtcgaaggttcccgtgagcgtgcgaagcgcggcgagctgctgttcggcaccgttgacacctggcttatctggaagatgacccagggccgcgtgcacgtcaccgactacaccaacgcctcgcgtaccatgctgttcaacatccacgacctcgactgggacgacaagatgctagacgcgctggacattccgcgcgccatgctgccggaagtgcgcaagtcttccgaagtgtacggtcagaccaacatcggtggtaaaggcgggacccgtattcctatcgccgggatcgccggtgaccagcaggcggccctgttcggccagctgtgcgtcaaggaagggatggcgaaaaacacctacggcaccggctgctttatgctgatgaataccggcgaaaaagcggtcacctccacccacggtctgctgaccaccatcgcctgcggcccgcgcggcgaggtgaactacgctctggaaggggcggtgtttatggccggcgcgtctattcagtggctgcgcgacgagatgaagctcatcagcgatgccttcgactccgagtacttcgccaccaaagtgaaggataccaacggcgtatacgtggtacccgcgttcaccggtcttggcgcaccgtactgggacccgtatgcccgcggcgcgattttcggcctcacccgcggcgtgaactccaaccacattatccgtgcgacgctggagtccatcgcctttcagacccgcgacgtgctggaggcgatgcaggctgactccggcattcgtctgcacgccctgcgcgtagacggcggcgcggtggctaacaacttcctgatgcagttccaatccgatatcctcggcacccgtgtcgagcgtccggaagtacgcgaagtgacggcgctgggcgcggcctatctggccggtctggcggtcggtttctggcagaatctggatgaactgcaggagaaagcggtgattgagcgcgaattccgcccggggattgaaactactgagcgtaactatcgttacagcggctggaagaaagcggtgaaacgcgcgttagcgtgggaagagcacgacgaagcgtaagattgtgaagttattcccggcttgcggcgtaaacgccttagccgggctacaaaaccccaaacagcacgatcttgtagcccggacaggtgcgcagcaccgcctccgggttttttatcagccaaatatcggcagcagcaggtacagcttaatcaccagcgcgttgacgatatcgataaagaacgcccccaccatcggcactaccaggaaggccatatgcgatggcccgaaacggtcggtaatcgcctgcatattggcgatcgccgtcggcgttgcccccaggccaaacccgcaatgcccggctgccagcaccgcggcatcgtagtttttgcccatcatccgataagtgacgaacaccgcatacagcgccatcgccagcgcctgcaccgccaggataataatcatcggcagcgccagcgaggccaactcccacagcttgaggctcatcagcgccatggcgaggaacagcgacaggctgacgttgcccaataccgataccgcgcgatcgaacacccgatacaaccccgccagcgccaggctgttgctgaggatcacgccgataaacagcacgcagacgaaggtcggcagctcgaagacgctccccgccagcagttgcgcaaccaccttgcccagcgtcagacagatggcgatcagggcgatactttcgatcagcaccagcgaggtgatcacccgccccacgtccggcttttcaaaggcggttggcgccacctgatcgtccggtgtcccgtccggtgaggaagagtgcttcaccagataacgcgccaccgggccgccgatcaggccgcccagcaccaggccgaaagtcgcgcaggccatcgccacctcggtggcgttggcaaaaccgtagcgctcaacgaacagcttactccacgccgccccggtgccgtggccgccggataaggtaatcgacccggccagcagacccattagcggatccagccccagcagcgtcgccatgccgataccgagggcgttctgcagcagcagcaggccaaccaccacgatcaggaaagtgcccagcaccttgccgccggcccgcaggctggcgaggttggcgttaagaccgatggtggcgaagaacgccagcatcagcggatctttcagactcatatcgaaatcaatttcgatatccatgctttttttcagcgccagcagcgccagcgccaccagcagaccgccggcaacgggttcaggaatagtgtatttcttaaggaagggaacggtttgtacgagttttctgccgagtaacagcacgagcgttgcggcaacgagcgtcgataaggtatcgagatgaaacataaaaagctccttatgggcgcatgatccattcacacgcgacgatattcctggtgtctttagcttctcatcatgaggagtcagagggggattttacgcagaacggcggaaaaattgacagaaaaagatattttgtatccttaatgatgcgatttagcatacaaaatgttaattacctcgttgcgcatattcacggtataaatttttatgagcaaacgctggcaaacgtttgcttttggtctacagtccgataaaattcccgctttgccaccttgggattgcttgtgatgtccgttaacaccgcagagtcagaaaatgcgcaaccggttgcgcataaaccagccagcgaattaatctaccgcctcgaagatcgcccgccgctaccgcaaaccctgttcgccgccttccagcacctgctggcgatgtttgtcgcggtgatcaccccggcgctgttaatctgccaggctctcggtctcccggcgcaagatacccaacatatcatcagcatgtcgctgttcgcctccggcgtcgcctctattattcagatcaaagcctggggcccggtcggctccggactgctctccatccagggcaccagcttcaactttgtcgccccgctgatcatgggcggtaccgccttgaaaaccggcggcgccgacgtccccaccatgatggccgccctcttcggcaccctgatgctggccagctgcaccgaaatggtcctctcccggatcctgcacctggcgcgccgtatcattaccccgctggtttccggcgtggtggtgatgattatcggcctgtcgctgattcaggtcggactgacctccatcggcggcggctacgcggcgatggccgaccacacctttggtgcgccgaaaaatctgctgctggcgggtatcgtgctggcgctgattattatcctcaaccgccagcgcaacccgtacctgcgcatcgcctcgctagtgattgccatggctgccggttatctggcggcgtggttcctcgatatgctgccagccaacaccgccccgaccaacagcagcctcatcaccgtcccgacgccgctctattatggcctcggcatcgactggagtctgctgctgcccctgatgctggtgtttatgatcacctccctggaaaccatcggcgatatcaccgccacctccgacgtctccgaacagccggtctcgggtccgctgtatatgaagcgcctgaaaggcggcgtgctggctaacggcctgaactccttcgtttccgcggtcttcaacaccttcccgaactcatgcttcggccagaacaacggcgtgatccagctgaccggggtcgccagccgctacgtcggctttgtggttgccctgatgctgatcgtcctcggcctgttcccggcggtgagcggctttgtccagcatatccctgagccagtgctcggcggcgccacgctggtgatgttcggcaccatcgccgcgtccggcgtgcgcatcgtctcccgtgaaccgctgaaccgtcgggcgatcctgattatcgctctgtcgctggcggtaggcctcggcgtgtcgcagcagccgctgatcctgcagttcgccccggactggctgaaaaacctgctttcctccgggattgccgccggcggtatcacggcgattgttctgaatttaattttcccgccagaaaaggcgtgatctcatgcgttcccggtcacgcaacggccgggacgtcctccaaccaccagccccatcacggaaataaaccacgcctgccttgagaagtgcgcctaaatcgggcataacacggtgatgtgcatctcacagaatggaagaccatgaaatttcttggaaagctgattctctggctgctagtcgctctgctgctcgtcattattggcgcgtggttcctgctgcaaacccactggggcgcccgccagaccagcgcctggctcagcaatggcaccggctggcaggtctccttcgatgagatggagcacgatttctcctccccccttcatgtgcagttgcgaaacgtcacctttggtcgggaaggcaagcctgccactttggtggcaaaaacggtcgacattggcttcagcacccgccagtttagcgatccgctgcatgcggatgagatagtccttaacgacggcactctgaatctgtcaccccactctgcagacctgccgttcgctgccgaccggctgatgttgcgcaatatggctttcaacagcccggaaaccggctgggcgctcagcgcgcagcgcgtcaccggcggcgtcagcccatggacgccggaggcgggcaatgtgctggggaaaacggcgcagatccagatgagcgcgggctcgatgacgctcaatggcgtcgaagccagcaacgttctgattcagggtaagattgatcagggcgaggtcaccctctccaccctcggcgccgatgtcgcccgcggcaccttaaccggcaatgccaaacgcagcgccgatggcagctggcgggtggataacctccagctcaacgagattcgactgcagagccccgcctcgctgaccgagtttttcgcgccgttaaccacggtcccctctctgcagattggccgcctggacatcaccgacgcccgcctgcagggaccggactgggcggtaaccgacctcgacctgagcctgcgcaacctgacccttagccacggcggctggcagagtgaggacggcacgctgtcgatgaacgctagcgaatttatctacggctcgctgcatcttttcgacccgatcctcaatgccgaattctctccccagggcattgcgctgcgacagttcacttcgcgctgggagggcggcatggtgcgcacctccggcaactggctgcgcgccgggaacgccctggtgctcgacgacaccgccttcgccggactggagtacacgctgccggcgaactggaaacagctgtggatgacgccgctgccaacctggctgcaaagcctgacgctgaaaaaattcagcgccagccgcaatctgatcatcgatgtggaccctgctttcccgtggcaaattaccgccctcgatggctatggcggcgagctacagctggtgaaaaacggcagctggggagtatggaacggcagcgcgacgctgaacgccgcggcggcgactttcaaccggatcgacgtgcgccgcccatcactcaaactgaacgccacagcctcgacggtcaatatcactgagcttagcgccttcaccgagcgcggcattttgcaggccaccgccgcggtatcccagctgccgcagcgccaggtcaatctgagcttcagcggccgcggcgtgccgctgaatattctgcaggcctggggctggccgtcgctacctataagcggggatggcaatctccagctgaccgccagcggcagcgtgcaggccgatgccccgctcaaaccgacgatcaacgggcagctcagcgccgtgaatatggagaaacagcaggtggcgcaaatcatgcgcaacggcgaggtcagcccnnnnnnnnnnnnnnnnnnnnnnnnnnncgtcaccccatagcgatgcccattccctctcctctatggggagagggattgcttcccggcaaaactccactctgactactctctccctttcagggagagagttggggtgcgagtcctgaaacctgtgcgcaatacgcggctatctgtacctatttagcgcaacaggttcctttcaaatatcagagttgctataaccaaatcactggaagtcgataaaaaaccgctccctgtacctacaaaaatataaaaggatcaatcatgcctgaaatacgtcagcgtattctggagaatatgcaaaaattctcccgggccatgatcggcgccgtattgttcttgccggtcattggcttaattctggccctcagttcagtattaactaatccgacattaattgctgaaaccagtttcttacatcagcttgggcaaatgctcggcgacaccttttggcctttatttggcaacctcggcttattattttgcgtcggcatcagctatggcctggcaaaggataaaaaaaccgaagtcgcactggtttcagtgatgtgttttattatgtttcttggcgccaaccactcctggctggaacacacccatggactcgccgaaaaaattaacggtgaatattatggcaccgggcaaacccagctgctgggctttgtggtggtggatatgggcgttttcctgggcattattctcggctgcacgattgcgtgggtgcacaataaagtctctgccattgagctgcctggcgcgctgtcgatgtacggcggcgccaagctgacgctggtggcgatgacgccggtggttatcttctacgccatcgcctttacctggatttggccctttatgacccacggcatctccgccctcaccggttttatgaaaaatgccggggtcgccggggtcttcgtctatggtttctttgaaaaattccttatccccaccggcctgcaccatttcgtctggtcccccttccagctcacccagattggcggcacgctgaacgtggatggtcaggtggtctccggcacccaggccattttcctcgcctatatgcgccatcccgacctgacgccggtcatgaacgacgcattacgtttttcgcagcaagggatgaccactatctttggcctggcgggcgcctcgctggcgttctaccacaccgcgaaaccggagaagaaagcgatggcgaaggcgattctgctgccggcgattatcacctcgatgctgaccggcatcaccgagccgattgagttcaccttcttatttgtctcaccgctgctgtgggtgatccacgcgacgttaaccgccgcctcgcaggccatttgcgacatcttcaccgtacgtccctggggagcatcgggcctgatcgagtttctgatctataacctgccgctgccggtctccttaacgcgctggccgggctatgtccttatcggtatcggccagttcgccgtctactacgtgattttccgcaccctggtggtgaagctgaacctgaaaacgccgggccgggaagatgacgagaacgtgaagctctacagcaaagcagagtaccgccagaaagtcgcgcaaccgcagtcggtcaccgatgacattatccgcggcctcgggggcaaggagaatattctctccgtcgataattgttttactcgcctgcgcgtggccgtgcgcgatatggcgcgggttgatgacacgcaattaaaaaataccggcgccaacggcgtcgtacgcaatcgaaatgaagttcaggttatttatggcgtcaaagtgggacaggtacgttcccgggttgataactggttagcagaaaattaatgaggagtatttatgaaattaaccgtattaggcgggggcggcgttcgctctgcatttttagcgaaatctctggcctataacgctcaccgcattggtttaacagaagtcgtttttctcgataactctgctgataatctggcgatatttggcgaaattgcccgctatgtatttaataccattcgcccggatattcagtttagtaccaccaccgacccggtcgcagccctgcaggacgccaactatatcattaccaccctgcgggttggcggcgatgaaagccgcattcgcgacgaacgtattgcgcttgagcataacactctcggccaggagaccaccggcgccggcggtttcgcgatggccatgcgctcgatcccggcgatccttcgctattgccggctgatcgaagaacatgccgccgaagacgctattctgtttaactttaccaacccgtcaggtctggtgacggaagcgattattaagtccggctttaagcgccgggtctatgggatctgcgatgccccctccgagctgattcgtgaactgccggcgatccttggctgtgaggagcgcgacctcagcgtggaatgctatgggctgaaccatttctcctggtttacccacttcaccgtccgtggggaagaggtgaccgaacggctgatcgccagcccggaactgtaccagaagacggcgatgcagtacttctccccggagctggtacggctttgtgataatcagctcctcaatgaatatctctattattactactatcgcgacgaggcgctgaaggcgattcaaggggccggcgagacgcgcggagagcagatcgcccgcatcaatcaggagatgcgcgaggcgctgcgcaccgtggatgccagaacgcaaccggaggccgccttcaccatctggatgcagcattacctacgccgggaaaacagctatatgcagaacgaatcccggcaggagaaattccacacccgcgaaccgctgacgctgcgccagtttatcgaagagccggacaccggcggctatgccggagtggcgctggatatcctggaagcggtgaacagcaccaccaccaagcggatcgtggtgtcgatccagaatcacgacacgctcgactttttgcgcccggacgacgtgatcgagatcagctgcgacctgagccgggatggcctcaaaccggtgacgccggtgaaggtaccgacggcgcagaagaatatgattgcctgcgtgaaggagtatgagcggctggcggtggcggcgatcctgcagcaggataaatcgctggcggtgcgggcgctgatggcgcacccgctgatcggttcctattcgctggcgaaaaccctggtcgaagcctatctcgacgatgagcagttcgccgcctggcggtaatccgctgccgatgggattcccccgctcgcaccgcgcttagcgggggctaactattgctacgtagactggtaaaccacatcttcaatagtcgctcaaagcctaagatgcagtagccgaaaaacgggttgctccagtaaatatcatcatcgaacttctgcgggtcgtgaataataaacgccgtatccgcggcctgcgccagcgggctttggtagtcgccggtaaagcagaccagattaatctccttcccctccagggccttaacccagttgagcgccgagctgctgcgcccggatttagaaatgatccagatggagtcgaagcaggcggcgtttttctgttcgaggatttcgtaatcgggccacagcgccaggctggcattcacgccggtgacgagaaacttgttgtaaatatactgggcgatcagctgtgaaaagccgctgccgtggatcaggatgcgctgctgtttaaggcttgccagcagcggcgtcagcgcttcttccggctgaacgctcatgtagtcgatatcgttggtgacatcgagcttcggcatggtgatattgaacttgatgaaatagaccagctccagccagccgctgaacttcagttttttcgctagccggaccagggaagaggggttgctgtagcactgttcggccacagcgcgaactccctggcggatacactgctccgggtcgttctgaataaagcgcagcacggtcatttccgttttgcttagcttcacgtcacgaaagatattttctacgtccatggcgggctcctctcagcggcagaatacgctaacaccgttcgacaaccgcgtctgcggcctgagtcaccacaatgaaatgaacgttactttttgtacaaaaatggaataaaaaaaccctctccgcctggcgaagagggctgcagccgttaagatggtgttttacagggtaatcgtcagcgtattgccctcggcgctcaccaccacgcccagttcgctaccggtctgcgtaccgccctgcacgcccgcgacctgcgggatattgcgcagacacagcgtccagccgcgggcctcgccttcgccgctcacagcgatggcgttaccctggcgcctggccttcagggtgaagatcgtcgagccgtctgccgccggaacgtcacagcgtgcctcgcgtccatcctcaaggtggaacagctggaaggcggtgccctcatgccaggcgtaatccggcttctggtcattgttgcccagcgccagcaggctgttgtcgcgaacgtagaccggcaggctcagcgcatcgtgatgctgcttatgccagcggctacccggcaattcatcgttatgccacagatgcgtccagtgcccttccggcagataaaactgcacttcgccggcctcggagaacaccggcgccaccaggaccgaatcgcccagcatatactggcggtcgagatagtcgcaggccggatcgtccggaaactcgagcatcatcgcgcgcagcatcggcgtgccgcactcgttggccagcgccgcctgacgatagagatacggcatcatgcggcatttcagctgcgtgaagtggcgcaccacgtcgcaggactcgtcatcgtaggcccatggcacccgataggatttgctgccgtgcaggcggctgtggctggagagcaggccgaaggcgcaccagcgcttgtagacgtgggccggcgcggtgttttcgaaaccgccgatatcgtgactccagaaaccaaagccggacatgccgatcgacagcccgccgcgcaggctttccgccatcgattcgtagttggcgtagcagtcgccgccccagtgcaccgggaactgctgcgcgcccaccgaggcggagcgggcgaacagcaccgcctcctgctcgccgacggtctctttcagcaccttccacaccagctcgttatagatgaaggcgtagtggttgtgcattttctgcggatcggaaccatcaaaccactggacgtcggtcgggatacgctcgccaaagtcggtcttgaagcaatcgacccccatcgccacgaggccttttagtttgtcggcataccactggcgggcttccggattggtgaagtcataaatcgccagccccggctgccacttatcccactgccacagcgaaccgtccgggcgcttcagcagataacccttctctttcagctccttgaacaccggcgagcgctgaccgatgtacgggttgatccacacgcagaccttcagccctttcgccttcaggcgcttgatcatcccttccgggtccgggaaggtctgcggatcccattcaaaatcgcaccactggaaggccttcatccagaaacagtcgaagtggaagacgtgcagcggcagatggcgctcagccataccgtcgatgaagctattcaccgtcgcttcgtcatagttggtggtgaacgaggtcgtcagccacagaccaaacgaccatgccggcggcagcgccgggcggccggtgaactgcgtatagcggttaagcaccgctttcggcgtcgggccgtcgatcacgaagtactcaaggtattcgccttcaacgctgaactggactttagagactttctccgagcccacctcgaaggagacgcgctgcggatggttgaccagcacgccgtagccgcggttggtcagatagaacgggatatttttgtaggattgctcggtgctggtgccgccgtcctcgttccaggtttctaccgtctggccgttgcgcaccagggcggtaaagcgctcgccgaggccgtagacggtttcgccgacgccgaggtcgaggcgctcaaacatgtagttgcgctgggtcttactatcctgcacgtagccgttgttttttagctggctaccggtgatacgcacgccgtcgcgcagaaaatccagcccccagaattcgcctttagtcacccgcacgctgaggctgccgcttttcagctcggcgaacccggccgtattttctatttcgacatggacgtctttctgcacgttcagcggatagtgcgggccgttatccagcgcgccctggaagtgctccatgcgcacgccgattatcccttcctgcggcgagaaaaagcgcagggtgaacaatggcgtatccagctgccaggcgcgttcgcggacatcgcgcggcgcggcatagaccaccatttcattcccctgctgctccacctcgtaaacctgtacgggttggatcaggttgagccctggttgaatgagccagtttccatcactgattttcattaaaacgtcctcttagttttgccattctttgtcgatcggggcggcggtgaaatcttgttcgttgcgacgcgcgccctcggccagctcggccatcatttttttcaggaacggcgttttcagcgtgtagtagcgtttggcgatcaccgcgctcagcaggtagcacaccgccggaacgagggtgaacaaggcgataatgatggtgagggtggcgctgttctgggttttagcggcggcatcatagccgccgccggccagcatccagccgatcagcgcgccgcccagcgccagtcccagcttgagcacaaacagggtgccagcgaagctgatgccggtcaggcgtttgccgttacaccattcgccgtagtcgacggtgtcggacatcattacccactggattggcgtcaccagctggtgcagtacgccaatgacgaagataaagacaaacatggtgatttcggcgtccatcggtacgaagaacatcgccacgctgagcaccgccaggagggcgttggtccaccagaagacgctgactttgcatttccagtcggtcagcggtttcgccagcgccgagccaatcaggttgccgacgcagtaggtcgtgaggaaggcggtgaacagcgccgccgagcccatgatccaggtggtgtaatacatcatcgcgccgccgcgaacgcagaccgcgaggatattgaggatggtgagcacgccaaccacccgccactggtcattgcgccagatatcgcgcaggtcttcacgcatcgaggtactgctcggcggcgcttcgacacgctctttggtggtaaagaagcagaaggccagcatcaggaaggcaatcaccgacagcaccgcgatgccccctggaagccgagcgctttgtcttcgccgccgataaagttgaccagcggcatcatcagcacggtggagagcatgcccccgccgtcgccagcacgaagcgccaggactgcagcgaaatgcgctgcgtcgggttgtcggtgatcacgccgcccagcgcgcagtaagggatattcaccacggtgtagagcagggtcagcagcgtgtaggtcacggcggcgtagatcagcttgccgttgtggcttaaatccggcgagctgtaggccagcacgcagacgaggccgaacgggatagcgccgaagaggatccatgggcggaacttaccccagcggctgcgggtacggtcggcaagcagacccatacacgggtcggaaatcgcgtccagcgcgcgcgccagcaggaacatggtgccgacaaagccggcggggataccaaaaatatcggtgtaaaaaaacatcatgtacaacatgacgttatcaaaaataatgtggctggcggcatcacccatgccataaccaattttctctttgacggacaaaatgtgatctttcatatgcgcactattcccttagcggcaccgagggttggtaccggttacggtttttgtaaacctttgccgcactaagatgaattgcgatatctcgttatcagattacgtttcttgttttctgtgatcgcggtagggaatcagggagtgaaaaagtgtaactcacggattttgtgaggatttgtccaggactgttctgtaaagtccagttttaacagtaaaaaagtgcgtttaggtatgtggtaaacggctgaaagtagctataatgcgccccgcctccatgtagcaatcgaggcgcggaagatcgtcatctccggtgaggtggctggacttcaaatccagttggggccgccagcggtcccgggcaggttcaactcctgtgatcttccgccagtttgcccctgctcccccacagccactccctaccaacctgagccccccaaactcatcatcccagccaatcatttttatccaaaccctgcgttattttgtctctcgcaaacccgttacactggcgcggtggccgcgtgccgttaccaaccgaaacaggagagccataatgacccccgaactcagacactgtttttccattaccatccaggttgataaaccgataattgtctcccgcagcccgcagaccggtaagcgccagctgatcccgattgtcggcggcagcgtctcgggtcaacttcgcggccacgtattacccggcggcgtcgacagccagataatcgaacccgacggcacctgcaggctgtccgcccgctatgccctgcaggtggcggaaggcacggtctatgtggaaaacaatggcatccgccgggtgccggcccagtatcatgaccagcttttcgccgacgatatgcgcttttttagcgatattccgccagaagccatctattttcgcaccgtgcccacctttgaggtggatgctcccgcgctcagctggctaaccacctcgctgtttatctgcgccggtggccggacccaggatggggtgatgctcgacttctatcaggtgggctgattttcactttctgcatataactgttattgccgttagcccgtttttcccctcccggcagcggtctacgatggctccatcttttcattcacccgaatcacagaccggagcagttatgaaagctatcgccattactcaagccgccgctgacggcaacaacatcccttctttaaccgagatcgacctgccgatccccaccgcccacgggcgtgatctgctggtcgctgtgaaggctatctcggtcaatccggtagacaccaaagtgcgcgccggctttcagggcgacacgccgcgggtgctgggctgggacgccgttggcgtggtgcagtccgtcggtgaggaagtgacgctgttcgcgcccggggacgaggtctggtacgccggcgcgctgggccgggccggcagcaacagtgaatatcagctggtggatgagcgcctggtggcgcacaaaccgcgcaccctcgataatgcctccgccgccgcgctgccgctgacggcgatcaccgcctgggagctgctgtttcaccgtctcggcgttgaggaaggcggcaatgcgggcgacacgctgctaatcgtcggcgcggcgggcggcgtggggtctatcctgacccagctggccagtaaactgaccgccatgacggtgatcggcaccgcctcgcgtccggagagccagcagtgggtccgcgaggcgggcgcgcaccatgtgatcgatcacagcaagccgctcgccgacgagctggcgcgcattggtatcacgtcggtaacccatgtcgccagcctgaccaataccgagcagcacttcaacgcgctgatcgacgccctcgccccgcagggcaagctggcgctgattgatgacccggagaccctggacgtggtgccgttgaaagcgaaaagcctgtccctgcactgggaatttatgttcacccgttcaatgtttgagacggatgatatgatcgcccagcatcagctgctcacccgcgtggcggcgctgatcgacaaccacactatcgaaaccacccttggcgaacactacggcgccatcaccgccgccaatctgcagaaagcgcatcgccagctggaaaccggacgcgccgtcggcaagatcgtgctggaggggttttaagatgatatcgcttatcgccgtgctcaaggcgaaaccgggccaaacggacgccctgcgtcaggccctgcaggcgctgctcctgccgacgagacaggagccgggcaacctcgactatgccctgtttcagctgcgcgacgcgccggacaccttctatatgcgcgaggcgtggcagggacaggacgccctcgatgcccatgtcgcgatgccctattttcaggcgtttatggcgcagatggagtctctgctggctgagccgctgcggctggactttctgacgccggttgagccttagcccaccggctgacgaggggtgggaaaatcacgcccctccgccgcgcgggtttaaaagtgggcgggaagcgggtgggttatcttttccagcaccccgcgatggaccgtaatgtaaccacctttgcgcagctctgccagaatcgacataacacggctgcgcgacaggttggtgcggcgctgtataaagcttaacgcattaatttggcgacgatactcctccgggtagtccgccagctctgttagcagggttcgcaccatcggataagaatccacccccaccatctcctgcgaacgcatgctcaacaccatcagccgctgcgccagaacatgggccatctcctgccacaggttttgcgcattgaggatctcgaccgcggcctggtgtcctatccagcgtccgcgcaaatctgtctcagcaaacagagagcagtggtgtttttccggaataccgttaaagacgccgtaaccatcgattaatcccaatagcgaaggggcaaatatcgttgatatcaccatgttgttttccgcatggcatagcgaggcaatcccctcttcgagcagaattaatccggattcagcctgggtcggcggaaaacgataataggtcgatcgcggcagcgcaaagggtgagctggcgggcaggaacgcagataacagggattccaccgcgaataacggctttgtctgtcttccgtaataaaaagacggtaacgcctggtcagtagagaggctggctgcagggatcgacatggtttttatgccatcaggtcaggttgaaaaagtgattcgttgagaatcatagtatcaacaggtgaattaacgaataaaagacaagacgttacgaggataaaaagagtgtaagcatcattatctgcaataactatttatctctattttacaggaataaaaaatacgatgagccttaattacctataaggcttagcggcgataaagataaggccaccttattatttactgcgctggctaacgccgcgcctgagggtttctctaccgctttccccctcgcatctcggccagtccaggctacgcttatcgatgccactgaccacccgcattcccctcccgttctattgagtccattcatcaagaagaggtttcgctatgctgatcaacgctattggtacctactccgccagccagccgctggaatcaatggccatcacccgccgcgacccggggccgcaggatgtacagatcgccatcgcttactgcggcgtctgccactccgatctccaccaggcgcgatcggaatgggcgggaacgctgtatccctgcgtgccggggcatgaaattgtgggtcgggtgaccgcggtcggcaacgccgtctcgcgctacgccgtcggcgatctggtgggcgtcggctgtatggtcgatagctgtcaacagtgcgaagagtgcgctgaggggctggaaaactactgcgaccacatggtgctgacctataacgggccgacccaggacgcgccgggacacacgcttggcggttattcacagcagatcgtggtcaatgaacgctacgtgctgcggataacccatcccgaagcgcagctggccgccgtcgcgccgctgctgtgcgctgggatcacgacatactcgccgctgcgccactggcacgtcgggccgggtaaaaaagtcggcgtggtcggcatcggcggcctggggcatatggggatcaagttggcccatgccatgggggcccacgtggtggcctttaccacctccgaatccaagcgtaatgcggccagagcgctgggcgccgatgacgtggtggtgtcgcgcaacgacgacgagatggcggcccacgtcaaaagcttcgacttcatcctcaacaccgtggcggcgccgcacaatctcgatgccttcaccacgctgctgaaacgcgatggcaccatgacgctggttggcgccccggccacgccgcatccgtcgccggaagtgttcaatctgatcttccgccgccggtcaattgccggctcgatgatcggcggtattccggaaactcaggagatgctcgacttctgcgccgaacacggcatcgtcgccgatatcgagctgatccgcggcgatgagatcaacgaagcctgggaaagaatggtcaagggtgacgtgaaataccgcttcgtgatcgacagtgcgaccctcgccggctaagcgccgcgacgaaaggtacgccgccattccgtcgggctgacgccaaagcgcgctttaaactgctggcgccaggtgaccgctgaaagatagcccaccgcctccgccacctgctcgaccggcagatcgcccgcctcaagcagagtctggctgcggcgcagacgttcggcggtcagccagtcggtaatgctcatcccggttgcccgggcgaagtggcgggtcagggtacggcggctcatcgccaccacccgggccagcgaatcgagactgtgcggctcggcaatatgctgctgcagataatccagcaggcagttgattcgcgcatcgcgggtgtttttcggcaccggctgggcgataaactgcgcctggccgccctcgcggtgcggcgaaacaatcatccgccgggcgatctggttggccgcgaggctgccgaaacgctggcggatgatgtagaggcaacagtccagcgccgccgcggtgcccgccgaagtaatgatccgctggtcgtcgacgtacagggcgttgatatccagctgcacctgcggaaaccggcgctggaaatcctgctcgaactcccagtgagtcgccgctcgcctgccgtccagcagcccggcgtagccgaggacgaacgcgccgaggcacaggccgacaatctccgcgccgttatcccgggcccgcaccaggctatcaagcagcgcctgcggcggacgtcgatcgacctcgccccagtaaggcaccaccacgatatccgcctgttccagcgcggcataatcgccggtggcgtacagcgcaaaaccatcgcgggcgcgcagcagccccggccgctcggcgcaaatgtgcagattaaagcgtttgatttccgaaaccgaatcgccaaacagcatgcaggggacggcgtagtgaaacgggctaaagccctctacagcgacaatcgccacgtcggtgagtttcatcgtcccttccccttacgcatgttaataaaccacggtttctccatcctgcgggatagaaaccacatcggcaatctgattatccagcgcatactggcgcatctcttcccgactcaccaggcagtggttgaccgcctcgaggtggatagccatgatttttgcttccggcagggtgaagtgcacgttcaggagatcttccttgcccatgataatcgggccaaagccgatgacgtgggcgtagccggcgttgaggaccaccacgtccgggcgcagcttcagcaggtcggctgcaatgtcatcgcgccagatagtatcccccaccagccacagcgtcttctcctgcggatggcgaaacaccacgccgcaggcctcgcccaggcgttcagccatcgccggcaccgcgtaggtgcggtcgctgccatgctgcccggaggtggttttcagcagacgcacgccggcaaattcgctgtctgccgacagcaggcgcagatcctgaaatccctggctgcgcagcagcgcggcgtcggcctcatgctggacgaacaccggcagggttttcgggatcgcggcgatcgctgccgcgtcccagtgatcgtcatgggtatgggtgacgatcaccgcatcaacgtcgataattttatcgcgggaaaacggcagctcaaccagcggattacgcagttcgctgcgcgcggtgcccggaaaacccggccaggcgcctttgtccgccagcatcggatcgatgagaaatcttttcccggcgtagtgaataatctgggtcgcattacggatgtgggtgatgttcatgttggcgttcctctggggtcatctgacgaacatcgtactgagtccccgcctggctcaacaggggcgtttgggcaatgatcgatgaaatcgggccaacctgcggcggttgccatccgcctccggctatgttgttcttaaggctcaatttttgacaggagtggcaggatgaaaaagaaactgaccgccgccgatatgcacgacccgcaggtcatcgccgagacgccgtggttcagcatgcgtaaggtgggtattgatgtcgcccccggcgagcgccgcgacttttattccattcattacccgcgcccggcggtggggattgtggccatccaggatgagaaagtgctgctgattcgccactaccgctacctgatcgataaggtggtgtgggcgatcccttctggcggcgtcgatgaaggggaagacccggcggtcgccgcactgcgcgagctgcgggaagagaccggctggcaggcgcaacgcgttgaggagatcattcgctttaacccctcctacggcagcagcgatcagctgtttatcacctggctggccaccggtttacgctgggtggggatggatgcagagcaggatgaggtgatggagaccggctggtttaccttcgacgagataaaccagctgatcgcccacggcgagatgccggacgggctgtcgctggtgccgctgctgcagctgatggcgcagcggcgaagcggctcgcttacggcttaagcatccgccagcggaaccacagctgggccacgaggatcagcacgccgccgataatcttctgcagcggcagctgttcgccgtaccacagcgcggcggcaatgaccgtcagcagcggttcgagcaccatgatgatcgccgcgctggccaccgccgcgtacttctgccccttcatctgcagaccgaagcgcaggctggtagcgatgacaatgctggccaccaaccagccgagagtcggcagggtcatcggctggtcccagcgttcaacggcagcggagatggtcaacccgacgataccggtgatcgccagctgcacggtggtcagggggatcagcggtacttcacgcgcgcagcggctggtgtaacagaaccagatcgactgcaccagcgccgtcagcaaaaaccagccctgactggggtggaaggctatcggcatatgcagactgagcagccccaggcctaccaccgcgatcggcaggcactcccaccaggcgcgaggcgggcgcactttcatcatcacccatgcggtcagcgggacgaacatcatcgacaggctcatgataaacgccccttcgccgagcgacgccgtcgtggagaccgaatagatccacaggcagaggttgagcgcaaaccagagtccgctgatgatgagttttggccagtgctgcttttgcgggcgaaaaccgcggcagaacggcagcagaagcagcgcggcgaagaaaaaacgcagcccaagaaacgcgaacaccggcatgccggcgatcgcctcgcgggaaaatatccagccgcaggcggcaatcaccgtcgcggcaatcagcagcaggtcagcctgccgttggcgtaccatacgcgcctctccctgtgtgttggcttaccagccaggcaccgcgccgccgttgaagatagtctctgccgccttcgccacctccggcgactggtacgactgcataaactccttcacgttttccgcgtctttattgtcttctcgggtcacgatgatgttcacgtagggcgagtttttatcttcgataaagatgccgtcacgaaccggcgacagcccggtttgctgcaggtaggtggtgctgatgatagccacgtcgactttgggatcgtcgagtacgcgcggcagttgcgccccttccagctccatgatcttcaggttatgcgggttgtcggtgatatccaccgccgtcggcagcaggccggtcccggctttgagggtaatcagcttctctttttgcagcagcagtagcgcccgcccgaggttggtcgggtcgttgggaatagcgatcgtcgcgccgtctttcagttcggcgactgacttgatcttgcgcgaatagccggccatcgggaagacgaaggtattcccgaccgccaccagatgatagttatgcgctttgttgtcctgctcaaggaaaggccgatgctggaagacgttggcgtccagatccccggcgttggtcgactcgttgggcagcagcgagccgctgaaccccaccagctcgacctccagaccgtacttctctttggccaccttcttcgccacttccgctacatcctgctcggcgccgttaatcacaccgaccttaatgtgcttcgcttcattacccttttggtcgcagccgaccagcgccagacccgccagcattaccgcggcggcggcccgtaaacgtaatctcatcctcttcaccctgtctgtcctgaatgtcattgtttttttcgtacaaaactatagcgactttcgggtcgggtaataaacagcaaaccacgcaactggaaataaaatcatcttcgcgaaacgcgaggcgctagccccggcgccactcgcccggcgtcacgccatagcgcattttgaagcgcttcgagaaggacgccagcgactgaaagccgcagcgttcggcaatgacctcgaggttggtctgacgctccaggcgcagcagccgggcggccagcgccattcgcagctgcgacagccacgcctgcggcgtcaggtgataaacgcgggcaaaatgacgggcgaaggtggcccgcgacagaaaggcacgggcggccatactctccagcgtccacggttgctccggggtcgccatcaccgccagcaccgccggcatcaggcgttcatcgctcatcaggcgcagcagcccgccgggcggctgttgctcgccaagcagcatgcgcagcaggagcaccagcagcgtatcgccgaggctgcgcacgatagcgctgccgccgggacgctgcgccaggctctcgcgcaccagtatattaagcagcgcgtccagctccgggcagtcttcacgcgcatcggtatggagatggatcagcgtcgatgcttcactgaacagccagctgacgtgcggaccaaaatagaattcgccgcacagcatctccagcgccccctccgccgggccggcgcgcatttccgtcaccgtgccgttaaaccggtgcgccaccggcagcacctggccccactccaccaggctctccatcaggtgcggcgaaccgtggggcaggaggacgacatctcccgcgcgcaggtgatgggtctggccgccgacgttgagccgcccctcgccgcgcagcaccacgtgccagggcaccacgccgctgcgcatttgctggtgcccggcctgccagcggccgccgaagcgacagtgcaggttcacttcgcagcgcggcgccagcagcgccagcagatgactgagactgtccatgcttctcctgagacgataagacaaaaaggtgagacgaagaccgccagtctagcatgcggcaagcgcctaagatgaccccattgccaacacaccctcgataacaacaggagttaaccatgagccgtttagcagatatccgtgaacaagacgccaccggcaaagccgccgatattttcgccgggatcaaaaaagcgatgggcaaagtgccgaacgcctacctgaccatcggcggccactcgccggcggcgctgcagcaggcgctggcgcacaatgcgatgctccataaaggcagcctcagcgcccaacagctggaagcgattaacctgtcggtcagcgaagccaccggctgtgactactgtctggccgcgcataccctgatggcgaaaaaagccggcttcagcagcgaacaaatccatgccctgcgccgcggggagtatgcggaagaggcgcagcttgatgcgctggtgaaattcgcgcagaccctggtgaccaccaccggtacgctgccggaagccgacgtcgccgcgctgcgcaacgccggttttagcgaccagcaggtgattgagattatcagcgccatcagcgccatcctgttcaccaacatggtgaaccgggttaacgacacggtggtcgacttcccgaaagccgattaatccgtcgcgcagcgccggttttacagccccagatcgctgagccccggatgatcgtccgggcggcgcccctggggccagtggaacaggcgctcgctttcggcgatcggcagatcgttgatgcaggcgtagcgcgtctgcatcaatccgtgcttatcaaactcccagttctcattgccatacgagcgaaaccagttgccgctgtcgtcgcaccactcgtaggcgaagcgcacggcaatgcgattctcctgccatgcccacagctccttaatcagccggtattgctgctccttgcgccattttcgctgcaggaactcaacaatttgcccccgaccgtggacaaattcgctgcggttgcgccattcgctatccacggtgtaggccagggcgactttttccgcatcgcggctgttccagccatcttccgcggcgcggaccttctggatagcgctgtcgcgggtaaacggcggtaacgggggacgttgttcggtcatgcttactctcctctacgggctaattgctgctgcaggcgctgattctcctgctccaggtcatgaatacgttgctgcaggttctggctgtactccgccacctgctgcgcgctgtagcgcggcgtaatgtgctgcgggcagttccagtcaaacgcctgcaaatgaaaaagaaacagacgttcaatgcgggcgcgatagttggccggcgccacctgcgccagcagctgcgggtggtcctctgccgccaggacctcgacggcggcgtagattttcagcctggcacggcgcggataatccatcaaaaacaggcaggcccggtcgctgccgcgcagattgccggtagtaatgtactggcggttaccgccgaaatcggccatcgccagggtggtgtcatccagcagatgcagaaaccccggcgggccgccgcgatgctgaatgtagggccagccgctctgcgacaccgtcgccagataaaagctgtcgcgggtggcgatcatccccgcttcgctgtcgccgaagcggtcggcctggcggcgactgcgcggcgtttgccacagcgagtcgctgcccatttcatgctgcacatccatcacgtccggggtgatagcgatatcgagaaaggttgctgccatagcgcctcctgttgtctggcgccatcatggactgtactgtgaagaatgataatacgggtaaagtggcaatcatctttccgaaaaacgggagaataatggatcgattaagcgcgatggcgctgctggtgaaagtgaccgagctggggagcatgtcggcggcagcgcgggcgctgaatatgccgttgaccaccgtcagccgccatattggcgaactggagagcgcgctgggcgtacgcctgctggcgcgaaccacccgcaaactgacgctcaccgacgccggggtcgattatgttgccgccgcccggcggatccttgaggaggtggaaaacgccgaacgccaggcgacgggcgaatatcaggagccaaagggtgagctggtgatctccgcgccgacgatgtttggacgccagcacgttcttccggtaatcagtgaatttatcgcccgctacccgctaattcgcgtccgtttgctgctcagcgatcgcaatgccgacctggtgagcgaccatgtcgatctggcggtgcggattggcgacctggcggacagcagcatggtggccacccgcctcggcaccatgcggattgtggcctgcgcccatccggcgctgctggcgaaatacggcgagccgcagcggccgcgcgatctggcggcgctgccgatcatccgcattgaatcgccgatgccctatcgcggctggcgctttcgcgccgctgagcgcgaggaccagctgattaacctgccgccggtgctatccgtcaccacgccggagagcgccgccgatgccgcgcggctgggggtgggggtggcccgcttactgcattatcaggcgctggatggcctgcgccacggggagctccgtctgctgctggaaaacgtcgagccggatccggcgccggtccatttgctgtataccgctcgggatctggcgccgcttaagctgcgcaaatttatcgattttgccgcaccggcgctgcgtcaggcactgttgcgcatcgccggggccgcttaatgcgtcgcggtcttcagcggcgcctcctttaacagccatgagaggacaaacgccaccgccataatgccggccgccatcagaaacgccgcgtggatcgccgcgccgaaggcgtcgaggtagtcgaggcggatatccgcgggcaggtgctggaccgccaccggattcattcccggcggcagcaccgcgccttccggcagcagttgttgcagtttgctctgcagcacatgcgtgaacaccgcgccaaacagcgccacgccgatggagccgccaatcgagcggaacagggtcacgccggaggtggcgacgccgtacatctgcgccggcatcgcattctgcaccgccaggaccagcacctgcatcaccagccccagacccgctcccagcacgccggtaaacaggtacagctgccacagcggcgagtgaatggtgatgcgggtcagcagtaccatgccggtcacgccgagcagggtgccgaggatcggaaacaggcgatatttaccggtacggctgataatccgcccgctgataatcgaggtcagcagcaggccgcccatcagcgggattaactgtaacccggcctcggtgggcgtcgcctccttcaccacctgcagatagagcggcaggaaggtgactgacccgaacagcgacatgccgatgacgaagccgatcaggctgcacagcaggaagctgcggttgcggaacagcgccagcggaataatcggctcggcggccatccgttcttcgtaaataaagccgatgatccccacgatgccgaaggccagaatgcaccacagctgcgggtcattccacgcatggacgctgcccccttccgaggtaaacaggatgatgcacagcagcgccatgctgagataaatcgcccccagccagtcaatctgatgctggctgcgtttattgctgctgtggaataccgcgccgatcaccagcagcgcgaacaggccgagcggcaggttgatatagaagatccagcgccaggaggcgtgctgcaccagaaaaccgccgatcagcgggccgatcaccgtcgccaggccgaaaacgccgccgaacagcccctgatagcggccgcggttggcgggcgggatgacgtcggcgaccgccgccatgctgatcaccatcaggccgccgccgccgagcccctgcaggccgcgcatcagcaccagttgggtcatattctgcgccagcccgcagagcgcggagccgacgagaaacagcccaatcgccacctgcagcacgattttgcggccgaacagatcgccaaatttaccgtacagcggcaccgcgatggtggagctgaggatataggcggtgaccacccaggaaagcttgtccagcccgcccagttcgccgacaatcgtcggcagcgcggtggagacaatggtctgatccagcgctgaaagcagcatcaccagcagcaatgcgctgaacaggaggcgtatcgactgcaccggtgggttagcgacttgagaagtcattacaacgctcgcttgaaattaattaaatgcataattaatatttagtgaaagaatgagtcgggtcaagagatcgccatatcatgacagcacaaaaggatcaggatgctccccgccgcccgggtcggccgcgcggtaaaaaaccgggtaccgccaaccgcgaacagttgatggacatcgccctgacgctgtttgcccgcgacggggcgggccgcgtatcgttgaacgccatcgccaaagaggccggggtgacgccggcgatgctgcattactacttcagctcgcgggatgcgctggtgactcagctgattgaggagcgctttatgccgctgcgcaatcacatcagccgcatctttgtcgatcatccacaggacccggtactggcgctgacgatgatggtcgagacgctggcgcatatggcggagaaaaacgcctggttcgcgccgctgtggatgcaggagatcatcggcgaaatgccgattctgcgccagcatatggatgcccgcttcggcgaggagcgttttcaggtgatgctggggacggtgcgtcgctggcagcaggaaggcaagatcaatccggcgctggcgccggagctgctgtttaccacggtaattagcctggtgctggtgccattttcacgcatccacagcgatccgcgtttacaggcggtcaaccgtcagaccatcgtcagccacgcgctggcgttaatgggccacggcgttggaggttaaggcgtggttttgacgcttttgtagtccggataagacaccacgcgccgccatccgggattttccctgctcgcgctacgcttagcagggctacaacttctatgttaattcccggcagattgcgctcccggttgatcttctgcgttatgtctcttatgccgcagggagcgcacagcacgaaccgtaggccgggtaaggcgacagccgccacccggcaagaatacaggtgccgtgcctgatatcctgcccggcggcgttgcgcttgccggtcctgggtggggcgaaactacgggaggactgtgtaggccggataaggcatttatgccgccatccggcacaaccacaggtacggtacctgaccgcccggggataccaggatcgttacagcgccttcgacaaatagtggcgctgcatgcctgcgtgcgggaagtcgggcagcgacatctgcagctgatagcctaatttctgataaaacggcagcgcctggaagctaaaggtatccaccagcagatggctgcagccttgcgcctgcgcctgctgttccgcctcctgcatcagctcgctccccagcccgcgcccgcgcgtcgtctcgctaacccacagatactcaatgcacagccagttgcccttgcgtttggcaatcagcccgccctgcattaccccttgcgcatcgcgcgagtaaatccccagatcgccaaactgcgccgcatcgagatactgctgattatactgccgtagaccggcaaacaattcttgttgatcgtcgggattaatgctttttgtaatgattagtgtcattaactatctccagtatcgcgctgccgaatggttattttccctctccactttcacaaaatattcttattttctccatgattatttgccttaattttttgcgttctaaaagtaagcaaaaaaacctttccattatcgcgacggatcgtataatggggaaaaatgagaatgatcattctcactacaaaaccagaggagatgcgcttttcacctcctgaagaccgaagaggttggcttcagcgaagacacaataacaatcacgttcaggaacatctgtgttccttttttgtcattttcgctcacccgaaaatgcctcagcgcccaacctattccctcgtttttaaataaacggggcggacgtcttatatcttgagaaaatataatgaaatacatcatagctcccatcgcgacagcattatttctccttagcggatgcgataatgcgcagacatctgctccgcagcaacccacgccggaagtgggcgtggtcaccctgcaaagccagccggtgccggtagtcagccagctcaccggccgcaccaccgcctcgctcagcgccgaagttcgcccgcaggtgggcggcatcattcagaaacgcctgtttaccgaaggcgatatggtgaaggccgggcaggccctttaccagatcgatccctccagctatcgcgcgacctggaacgaagcggcggcggcgctgaaacaggcccaggcgctggtggtctccgattgccagaaggcccagcgctacgcgtcgctggtcagggataacggcgtttcccgccaggatgccgacgacgccgcctccacctgcgcccaggacaaggccagtgtggaatcgaagaaagcggcgctggagagcgcgcgcatcaacctgaactggaccaccgtcaccgcgccgattgccgggcgcatcggcatctcgtcggttacgccgggggcgctggtctccgccgatcaggataccgcgctggcgacgatccgcgggctcgacaccatgtatgttgatctgacgcgatccagcgtcgatctcctgcgtttacgcaagcaaagcctggccagcaacagcgacaccctcagcgtgacgttaaccctggaagatggcagtacctatcccgaaaaagggcgtctggcgctcaccgaagtcgccgtcgatgaatctaccggctcggtgaccctgcgcgctatcttccccaacccgcagcacgtcctgctgccggggatgttcgtccgcgcgcgcatcgatgaaggcatcatgaacgacgcgatcctcgccccgcagcaggggatcacccgcgatgccaaaggcgacgccacggcgctggtggtcgatgccgccaacaaagttgagcagcgtaccgtggaaaccggcgacacctacggcgataaatggctggtgctgagcggcctgaaagcgggcgacaaactgattgtcgaaggcaccggtaaagtggccccaggacagacagtgaaggccgtcgccgtcaacaataacggaggcaacgcctgatgttctcccgtttcttcgtgcgtcgcccggtctttgcctgggtgatcgccattctgattatgctcgccggggtgctggcgatccgcacgctgccggtaggccagtacccggacgtcgccccgccggcggtgaaaatctccgccacctataccggggcgtccgccgaaaccctggagaacagcgtcacccaggtgatcgagcagcagctcaccggcctcgaccatctgctctacttcagctccaccagcagctccgacggctcggtcagcatcaccgtcacctttgagcaggggaccgacccggacaccgcccaggtgcaggtacaaaacaaagtgcagcaggcggaatcgcggctgccgagcgaagtccagcagtccggcgtaacggtggaaaaatcgcagagcagctttctgctgatccttgcggtgtatgacaaaaccaaccgcgccaccagctccgatatctccgactggctggtcagcaatatgcaggacccgctggcgcgcgtggagggcgtcggcagcctgcaggtattcggcgccgaatacgcgatgcgcgtctggatggacccgaccaaactcgcctcctactcgctgatgccttccgacgtccagtcggcgattgaggcgcagaacgtgcaggtttccgccggtaaaatcggcgcgctaccgtcgtccaatgcccagcaattaaccgccaccgtgcgcgcgcagtcccggctgcaaacccctgaccagttcaaagcgatcatcgtgaaaagccagggcgacggctcggtagtgcgcctgagcgatgtcgcgcgggtggagatgggtagcgaggattacaccgccaccgccaatctgaacggccacccggccgccgggatcgcggtgatgatggcccccggcgccaacgcgctggacaccgcgacgctggtgaaaagcaaaatcgccgaattccagcgtcagatgccgcagggttacgatattgcctatccgaaggacagcaccgagttcatcaaaatctcggtcgaggacgtgattcagaccctgttcgaagcgattatcctcgtcgtctgcgtgatgtatctgttcctgcagaacttccgcgcgacgctcattccggcggtggcggtgccggtggtgctgcttggcaccttcggcgtgctggccctgttcggctactcgattaacaccctgacgctgttcgccatggtgctggcgatcggcctgctggtggatgacgccatcgtggtggtggagaacgtcgagcgcattatgcgcgacgaagggctccccgctcgcgaagccaccgaaaaatcgatgggcgaaatctccggcgcgctggtggcgattgccctggtgctgtcggcggtgttcctgccgatggccttcttcggcggttcgaccggggtcatctatcgccagttctcggtaaccattatctcggcgatgatgctgtcggtggtggtagcgctgaccctcaccccggcgctgtgcggcgcgctgctcagccactccaaaccgcacaccaaagggtttttcggcgcctttaaccgcctgtgggggcgcacggaggcaggctaccagcgccgggtgctcggcggcctgcgccggggcgcagtgatgatgggcgcttacgcgctgatttgcggggcgatggcgctggcgatgtggaagctgccgggcagcttcctgccggtggaggaccaggggagatcatggtccagtacaccctgcccgccggggcgacggcggtgcgtaccgccgaggtgcgccgccaggtcaccgactggttcctcaccaaagagaaagccaataccgatgtcattttcaccgtcgacggcttcagctttagcggcagcgggcagaacgccgggatggccttcgtgtcgctgaaaaactgggcgcagcgcaaaggggacgacaacaccgcccaggccattgccctgcgcgccaccaaagagctggggacgatccgcgacgccaccctcttcgccatgaccccgccgtcggtggacggcctcggacagagcaacggcttcaccttcgagctgatggccagcggcggtaccgaccgcgacagcctgatgaagctgcgcagccagctgctggcggcggccaaccagagcagcgagctgcagtcggtgcgcgctaacgatctgccgcagatgccgcagctgcaggtggatatcgataacaacaaagccgtctcgctggggctgtcgctgagcgacgtgaccgatacgctctccagcgcctggggcggtacctacgtgaatgactttatcgatcgcggccgggtgaaaaaggtctatatccagggcgaaagcgacgcgcgcgcggtgccgtcggaccttggcaaatggttcgttcgcggcagcgataacagcatgacgccgttctccgccttcgccaccacccactggcaatacggcccggaaagcctggtgcgctacaacggctccgccgcctttgagatccagggcgaaaacgccgccggcttcagctccggcgcggcgatgaacaagatggaaaagctggccgacagcctgccggcgggctccacctgggcgtggagcggcatttcgctgcaggaaaagctggccagcggccaggcgatgagcctgtacgccatctcgattctggtggtgttcctgtgcctggcggcgctgtatgagagctggtcggtgccgttctcggtgatcatggtcatcccgctcggcctgcttggcgcggcgctggcggcgacgctgcgcggcttaagcaacgacgtctacttccaggtggcgctgctgaccaccatcggcctgtcgtcgaaaaacgccatcctgatcgtggagttcgctgaatccgccgtggatgaggggtattcgctctcccgggcggcgatccgcgccgcgcagactcgcctgcgcccgattgtcatgacctcgctggcgtttatcgccggggtgctgccgctggccatcgccaccggcgccggagccaacagccgcgtggcgatcggcaccgggattatcggcggcaccctgacggccaccctgctggcggtgttcttcgtaccgctgttcttcgtgctggtgaagcgtctcttcacccgccaacgtccttctcaggagtaaggtatgtttcgtttaagttttatgtttatcgcgctcctgaccgcgggctgcgtctcgcttgacccgcattatgatcgcccggccgcgccggtgccggccaccctgcccggggcgcacggcgaatcgacggcggtggtcggcgactggcagaaagtggtcaatgatgcgcggttaaaaaaagtggtcagcatcgcgctgaacagcaaccgcgatgtgcaaaaggcattggccgatattgaagccgctcgcgcccagtatggcgaaacgcgggcatcgctgtttcccaccgttgatgccgaactgagccacacccgcagcaaaacggtggccagtggcctgagctccgcttcacaggccgacggcgcggtctccagcttcgaactggacttgttcggcaagaaccagagcctgtcgcgcgcggcgcgcgaaacctggcttgccagcgaattcaccgcgcagaatacccggctgacgatgattgccgatttgaccaccgcctgggtgacgctggcgacggataacagcaatctggcgctggcgcagcagaccatggacagcgcggcaaactcgcgcaacatcgtcgcccgccagatggcggttggcaccgcctccgcgggtgatttaagctcggcggaaagcgtctatcagcaggcgcgcgccagcgtcgccagctatcgcacgctggtggcgcaggataaaaacgccattaacctgctggcgggggaaaccgtgccggagagcctgctgcccggcactctcgagagtctcggggataacagcatcgcgctggtgccggcgggcgtgtcgtcgtcggtgctgctgcgtcggccggacattcaggaagcggagcacaatctgaagagcgccaatgccgatatcggcgcggcgcgggcgaacttcttcccgtcgatttccctgaccgccagcgccggggtcggcagcgactcgctgtcgtcgctattcagccacgggatgcaggtgtggtcgttcgccccctccatcagcctgccgctgttcaccggcggcagcaacctggcgcagctgcgctatgcggaagcggagaaaaaggggctgatcgccacctacgagaaatcgattcagagcgcgtttaaggacgttgccgatgcgctggcgcgccgggaaacgctgagcgaagagcttgatgctcagcggcagtatgtcgccgccgagcagacatcgctggatatcgccatgaagagctatcaggccggggtcggcgattatctgtcggtgctcaccgctcagcgcacgctgtggtcggcgaaaacgacgctgctgtccctgcagcagaccgacctcaataaccggatcaccctctggcagtcgctgggcggcggcgccagttaaacttacccgccgggcgaccgagcccggcctctacaaggaatcgttatggcacgtgtttccctctcctgggcgctgatcctcggcctgctgtcgggtatcggcccgctgtgcacggatttttatctaccggcgctgccggagatcactcagcagctgcaggccaccagcactcagacccagctgtcgctgaccgccgcgctgattggtctcggcctgggtcagctgtttttcggcccgctgagcgaccgcattggccgcctgaaaccgctggcgctgtctctgctgctgtttatcttctcttcggcaatgtgcgccctgacccgcgatatcaacatgctgattgtctggcgctttttacaaggcttcgccggcgccggcggctcggtgctgtcgcgatccatcgcccgcgataaataccagggcaccctgctgacccagtttttcgccctgctgatgaccgtgaacggcattgcgccggtgctgtccccggtgctgggcggctacgttatcaccgccttcgactggcgaattctcttctggacgatggccgccattggcggcgtgctgctggtgatgagcctggcgatcctgcgggaaacgcgcccggccacagcggcgcatgccagccgccaacggcccggccagccggtgctgaaaaatcgccgctttctgcgcttctgcctgatccaggcctttatgatggccgggctgttctcctacatcggctcttcttccttcgtgctgcagagcgaatacggcatgagcgccatgcagttcagtctgctgttcggtctgaacggtatcgggctgatcatcgccgcgatgatcttttcccgtctggcgcgccgctttagcgccgaaagcctgctgcgcggcggcctgacgctggccgtgagctgtgcggcgatcatgctgctgtttgcctggctgcatctgccggtgctggcgctggtcggcctgttctttaccgtgtcgctgatgagcggcatcagcaccgtcgccggcgcggaggcgatgagcgccgtcgacgccgcgcagtccgggaccgcgtccgcgctgatgggcaccctgatgtttgtcttcggcggcatcgccgcgccgctggcgggtctcggcggcgaaacaatgctgaaaatgagcctcgcaatggccatctgctacctgctggcgctgctgctgggcctcagcaaaccgcgcgacgcacgctaatctcctgctgcggtaataaaatattccagatttattaccgcactatttcccgccatatctaccattctcgtattattttccgcgtactaatcgtgatactcttcacaggaaaggaataaataattccttatactgcgcgccactgagaataacgaggtttctatgagtatcgacctgagcaaactgctgaccgagcgacgtaacgccaacagcgccaacattgacaccctctccaccctcgagatgctgacggtgataaaccaggaagaccagcaggtagcccaggcgataacgccctatctgccgcagattgccgaggtggtggataaggtcgcggcggcgctgcaggccggtggccgcttgatttacattggcgcgggtacctcagggcgtctggggatcctcgatgccagcgaatgcccgccaaccttcggcacccgcccggagcaggtggtggggatcatcgccggcggacataaagcgattctcagcgccgtggaaaacgtggaagacaacaaagcgcagggggcgatggatctgcagaacctgaacttcagcaaccgcgatgtgctggtgggactggcggccagcggacgcacgccgtacgtcattggcgccatggaatacgcccatagtcagaatgcctttgtcgccatcgtcagctgtaacccgcatggcgaaatggcccagctggcggacgtggcgatcaccccggtagtcggcccggaagtggtcactggctctacccgcctgaaagccggcaccgcgcagaagctggtgctgaacatgatctccaccggggcgatgatccgcgtcggcaaggtgtacagcaacctgatggtcgacgttgaagcgaccaacgccaagctgattgagcgccaggtctctatcgtgatggaggccaccgactgcgatcgcgccaccgcccagaaggcgctggaggcctgcggccgccactgtaaaacggcgatcgtgatggtgctggcggacttaagcgccgcagaggcgcagtcgctgctggcgaaaaacaacggctatatccgcaaggcgctcagcaacacctgagcgccgacagacaggtaacgggcaatggcaaaaataacgaaagagatgatagcgcggatcctcgcccacgtgggcggcgccgcaaacgtcgcgcaggcgggcaactgcatgacgcgcctgcgcttgaccctgcgcgatgaaagtctggccgacagcgccgccatccgccagattgacggcgtgatgggggtgatcgtcagcgacgagcagttccaggtggtgctcggccccggcaaggcgcaaaccgccgccgaaatgatgaacggcctgctggaggcggcgcccgccgccgcgccgacgctggccgacgtcgcggcggagaaaaagcaggcgctgaagggcaggcagaccagcgcggtgcagaagtttctcgccaaattcgccactatctttacgccgctgatccccggctttatcgccgtcgggctgctgctgggcttcgccaccctggcggaacaggttttcgtgctggagaacgcccatccgaacgccagcctggtggcgctgattggctatatgaaggtcttcagcaaagggatgttcacctttctgagtatcctgattggctataacgcgcagaaggcgttcggcggctccggcgtgaacggcgcgattatcgcctcgctgttcgtgctgggctacaacccggaggcaactagcggcttctacgccggcatttccaccttcttcggccatggcatcgatccgcgcggcaatatcatcggcgtactgatcgccgctatccttggcgcgtgggttgaacgccaggtgcggcgggtgatgccggccaacctcgatatgatcctcacttcggcggtgacgctgctgatcatgggcgcggtgacctttacggtgatcatgccgattggcggctggttgtttaccggcatgtcgtggctgttcctgcatcttaacggcaacccgtttggctcggcggtgctggccggcctgttcctgctggcggtgatgttcggcgtccatcaggggtttgtcccggtctattttgcgctggtggacgcccagggctttaactcgctgttcccgatcctggcgatggccggggccgggcaggtgggggcggcgctggcgctgttctggcgggcgaagcgcgattcgctgctgcgaacccagattaaaggggcgattattccgggcttcctcgggattggcgagccgctgatctacggcgtcaccctgccgcggatgaagccgtttgtcaccgcctgcctcggcggcgcctgcggcgggttcttcgtcggactgatcgcctggctggggctgccggtcggcctgaacacggtgttcggtccgtccggtctggtggcgctgccgctgatgacctccggcagcggaatttacgccgggatggcggtctacgccggcgggctggcggtctcctacctgtgcggttttgtcctcacctggctgttcggcagtaaaaatgtcgatttaagctagaacgcgactatcggttaatgcccggcggcggcttcgccttaccgggcctgcaaaatagttacgccgccgcgcccgactaccatttcctgccccgccgcccgggcgcgcgcatgctatgattcccctttgtcatatttcgcttgaggaaaagatgggctccagcaaaaaagggatgctgaacgtactgattgccgccgtgctgtggggcagttccggggtgtgtgcgcaatttattatgcaggaaagccagatgtcgtcgccgtttctgaccatgacgcgtctgctgttcgccgggctgatcctgctgatgctcggctttgttcacggcgaccgcattttccgcgtgctgcaaaaccgccgcgacgccctaagcctgctgtttttctcgctgtttggcgcgctaaccgtgcagttcacctttctgatgaccattgaaaaatccaatgccgccacggccacggtgctgcagtttctgtcgccgacgatcatcgtcgcctggttcgccctcgcccgcaaagcgcgtcccactccgctggtgctgggggctatctgcacctcgctggcgggcacctttctgctggtgacccacggcaacccaacgacgctgtcgatttcgccggcggcgctgttctgggggatcgcctcggcgtttgccgccgccttttataccacctatccttcaacgctgattgcccgctacgggacgctgcccatcgtcggctggagcatgctgttcggcggcgcgatgctattgccgttttacggcggccagggcaccgattttgtggttaacggcagcctgctgttagcttttttctacctggtggtgatcggtacttcgctgaccttcagcctctatctcaacggcgcgcagaagattggcggcgcaaaggccgggatcctcagctgcgccgaaccgctgagcagcgccctgctgtcgctcctgctgctggggatcaccttcacgctgccggactggctgggcactctgctgatcctcgcgtcggtggtgctgatcgccatcgactcgcggcggcgggtgagagccgcctgagcaggcgataaaaattgcattttcaataagttaaactgaccactatttgcgtgttttcccgcctgcgcatatagttgacggaagcgattacggaaggagaagcctgatgaaagcatgttggatggtatgcctggtcaccgccctgagcgccacgtcggcgtgggccgaatcaccgctgcaaagcctgcagttcgagcagcaaaaacagcaggtgctcaaagcggtgaaggaaaaatgcgcgccagcaagccacctcagcgacaacgattttgccaataaagtgctggcgaccgacggtaacaagaacgcggtccgcgaagcaacgctggcgaaggagcgcaataaccagaaaagctaccaggccgcaatcgacaaaatcgtctgtccggccaaatagcggttatttcagcctcgcgaccagcgttttccagtcaaacggcgtcagctgcctgtagctcaggctacgggcggccatctgctccggcagctggcgctggcttttcgcgatcgcctcgctcattatcccggcgctccccacgtcacgcagggttttcaccacctcttccatctcttcgctgcgccgaatgccatgttccgccacccggctgatcagatagtcggggaacgcgcctgtccagcccagagagggaaaactatgatgcaaggagctaagcacctcctcctcaacgccgtattcacgagccgcgaacaggcattctgtggtaagcgcttcaagacctttgatcatcacgctacggcacatttttatcgccgacacctggcccaccgtactggcgccatagcgggcattcagccccagcccccgcagacgcggcgcgatcgcctccgcctgcggcccgccgatcaataacggtgtctgcaatcgggccggcggtaccggcgccatcaccgcgacatcgatgtaggcgcccggcagaaaatgttcagccgcctgccgtttcgtctccggcgccacggagttgagatcgaggaaatattgtcccggctgcagcagcgcggccgcctgctgcgccacctttagcgcctcaccggcggtcacagtagaaaaaaccagcgtggccccctccagcgcctgcgccagcgaatttcccacctgaacgcgcgaatcacgggcttttttgcccatcgcctctcgctccgggccattgagcttgcaatcccaaatggtcaccgcatgctcacgggccagatccgccgccagaatgccacccgcctcgccaaaaccaataaacgcgattgtcatcatcactcctcacgcggccagacgcgggccggaataaaaacctcgccagcaaacagcagtcgcgccgtgcgtaacaggccgcagccagccagggcgccgtcagcatcaagctgaagcgtcacgctaaattcgcctgtcggatgctcgacgctgagcagcggcgtatcgcctggcgctacctgcgccaggccctgcgcgacagagccggggagcagacaagcgctggccacgctcaccgcgccaaatacgccgatcgacgcgtggcagcggtgggggataaaggtgcggctgctgatggcgccgccgtgtcgcggctcggcgatcagggtcatcttgggcaccgtgcgctggctgacgtcgccaagctgcatcagcggcccggcctgcaggcgaatcgactccaggcgacgtttaagcgcgtcgtcattatccagctgttcgcgcgtctcatagccggtgcaaccgaggtcgcacgcgcgcagcaggatcaccggcattccgttatcgatgcaggtcacctcgacgccgtcaaaacggtcacgaacccggccggtcggcagcagcgccccgcagctggagccggcgacatcaagaaaatggagcaggatcgggctggcgctgcccggcacgccatcgatacggctctcgccgacgtagttgaccccgtcggcgtcacaggggatctctgccaccgccagttgccccgtgttctccataaaaatacgcacccgagtgagcggcgcatcgtggcgaaccagaccgcgctcgatggcgaaagggccaacggcggcaagaatattgccgcagttttggccataatccacggtagccgccgccacgttcacctgggcaaatagatagtccacatcggcgtcaggtcgtgcggagcggcggataatcgccactttgctggtcagcggatcggcgccgccgatcccgtcaatttgccggggatcaggcgagcccatcaccgccagcagcaccgcatcacgtcgcaccggatcggcaggcagatcgtcggccagaaaacaggccgctttagaggtgccgccgcgcatccatagacaggggattccgcgttgcgccatttattcctccacctcgtctgcgcggtcgtaataccgcaggcccttttccgccagacgcggacgcatagcgtaaatatccagccccaactcgccattgcgcatccgctcacgtttcgcaagctcattgctcatgcgggcttccgctttatggagcacatcacggacccgggcgtgaggcagcaccacgacgccatcgtcgtcggccactacgacatcgcccggctgtacaagctgacctgcgcatatcaccgggacgttaaccgaaccgaggctctctttcaccgtcccctgggcataaacctgacgggaccagacggcgaatcccatttcccgcaacgtttgcgaatcacgaatgccgatatcgcccaccagcccgaccacgccgcgcgattggagagacgtcgccagtagatcgccgaagaagccatcgccgcacggcgaggtcggggccaccaccagaatatcgccggcgcggcactgctcgaccgccacatgaaacatccagttgtcgccaggcgtcaccagcacggttaccgcgttgcccgcccggctgacgccctgctgaatcggacggattgccggccccatcagcccctgacgatcccaggcttcatggagcgtcgccaccccggccgcctcacagcggcgcaaaaccgcctcgtcatggcgcggcaggtggcggatcacaaggccttttttatttaacaggttcatgccaggttctccgttacgcgggggaagatgctctggaaggcttcgccgtgaacgatatcgcgcgcggccgtgatgccgatattgcgcttggcctgcaccccgcgctgcagcgccacgcgggtgtagtattcccacagatgctcctgaccctgcatgcactgaatggcctgatactttttctcccagacagcggtgatgtccagcaacacatcgggtttccagttgcactgctccggctggtgcggttcgaaacagtaaaccgggggagcagcgacaattttctcaccggggcgatagccctctgcctgggcgataatccgcgcttcctgcgccagatgggaggccagggggtgatcgtagttatagggatcctgcagggagtgcgtcaggacaaagtggggctggatacggcgatacacatccgccagacgaaatagcgtctctttatcggcgcgcagcggatagtcgccgatatcaaagaattcgacgctggcgcccaggatcgcggcggcggcctgcgcctcttcgcgacgcacctgcttcaccgcctcctcggtcatgttgcctttacgccacagtttggcggactcgccgcgctcgccaaaggataaacagaccacatggacctgatagccctgcagggcatgcagcgctatcgcaccgcccgcgcgccagacgaaatcggccgagtgggcgctgacgacaagggcacttttttcgctaaccggatgagacatgatggcttcctctgttgtttttttcagcttgtcatgtcccgtcgtggggaggtaattcgttaacttgcgaaggctatgatttttatttatgttgtcgtctcactcactttttcaggcctgacgaacaatgctaaagagaaagcacgataaaattataaatatcatgcagctgcgctttttctgtcaggtcgcgctgcgcggtagcgtctcacgcgcggccgatgacttattccgcacgcagtcagcgataacccgggctattcgcgatcttgaagccgcgttgaacgtcacgctgttcgaacgccattacagcggcatggtgcccaccgagtatggcaagtgcatcctgccgcgcgcccggcgggcgattgacgacctgcaggccatcccggcgctgctgcagaagcaccatacccgcagcagcggcccgctggcggacgccggctggctgttcaatacccgccgcttagccatttttattcagctctatcacgtcaaccatacccaaaccgtcgcgcaacagttggggatcactcagccggcggtcagtgccgcgctgaaggtcctggaaaaaggagcggattcggcgctatttcgccggacgccagagggggtgcgtcccacgcctgccgcggagctactctatcccccggtgagcagagcgctcaacgagctggaaaacatctggagcgatctcgctgcccgtcgcggggtgctggagggcaccgtgcgcattggcgccctgccgctgagccggacccggctactgccctccgccatcgccgcctttctggcccagcacccgggcatcaccctcatgaccaatgaaagcccgtatgagtcgctggtcgccgatatgcgggcaggtaatatcgattttattatcggcgccctgcgccaggatgaagatctcccggacctctgtagcgaagcgttattcgaagaggatatgttgattttactgcgtaataaccacccgctgcttcgccatccggacccacgcagccagctggcgacagcgcaatgggtgctgccgcgcgccaacgcgccggcgcgcaatttgctggataaggcgtttgtcaccctggggctgccgctgccccagccgacggtggagaccggggatgcggcgatggtgcgaggattgctgcagggctccgacatgctggcggcggtctccgccagccagatgcgttttgaaactgacaatgggctgcttagcgtgttgccggttcccctgcccgataccacccggcgtatcgggctgacgtttcgcgccggcagcctgccctccccggcgacgcaggcgctgttgcgttttatttatcagcaggttcaggacggggccgtttaacgtttacccgccaccgaataggttacctgctggttgcgcgtttgctgaaacgcctccagcgtctgcccgcgcatcgcggcgtaaatatgcaggttggatacgccgaccaccgcgcccattttctccagcaggaagaagctggcgccatactgaattaatccccgccagtcgcgcgcgttgagcaactgctgttcctcctcactcagtccggcttcggcataaagcgactgaggcgactgcagaaaacgttcacgccaggcaggctcaatcagccgatgcaggaaacggttaagccgcaagccattcaggctgcgctcgtgggtaaaaggataggttcccggcagtttctccaccccggccagctgctgcgccatatgctggcgatggcgcgtcagggtatcgacggggggcaggcgcgcattgttctcaaggatcagcgtggcgataccggtcatcgagggcaggtaatagtcgcgccaggtttcggtgacattggctgatagcgcgccgcgcatcaccagccacatgattacttcggacccctccatcccccccagctcggcatattcgccaagggtcatttcggtaagcttttccgggtcattaaccagcatatcaacaaactgggcatcccagtcgggattattaaatccgcagcgctcgccatgaacctgatgcgagagcccgccggtcgcgacaatcgccacattgatatcttccgggaagctttcaatcgcccggcgcagcgcctggccgagtttgtaacaacggcgcgcgcttggtaccggaaattgcagcacgccgatctgtaacgggatcaccgccgtcggccacccctgcgcttcatcccagggcaacagcgccgaaagcggcgagaaaaggccgtggtcgagctttttatccataaagaacgacatatcaaactcgtcggccatcaggctggcgccaatgtgccttgagagcgccgcgttgccctggaccggcggcaggcagcgcggtccgcctccctcatcggcaacgtcatattgactatcgattcccagcgtaaaagtcgaatagtgatcgaagaaaaaggcggtcacatggtcattaaagatgtataccagcgcatccggttttttctcctccagccagcgctgcagcggttcgaagctctggaagatcggcgcccacgccggatcctgctgtttatgatgatcgaccgcgaagccgatagtcggggtatgagagacggcgataccgccgagaatgttagccatcagataactccacttatcggtgttcgaggggggatgacaaagcgtcaagttctgcctctgtgagtcgaggcttagcgtgattcatacggtgcaacaaaatacagatccccgccaggcaggccggcagcgcaagcaccaaaaagatcgacgagtgtcccggcacggccagcatcagcatcccgcccagcgtggagctgaggatagccccggtacggccgataccatgcatccagctgacgccggtagcgcggatctcggtttgataataggcgggcgaataggcctgcagaccgttctgcgcgccgttaatgcacatcccgctgataaaaatcagcaccgacagcgccgccgaaccgaaatccatcaccccctgggacaacaggcacagacagccgaggaaataggttgccgcaatcacggctttcgccgaagcgcgatccatcagcataccgacaaggatcccgcccagcgggccgccgagctggaacaagccggtcatcatcgccgcctgctgcagcgacagcccgccggagcggagaatggttggcagccagccgttcagcaggtaaatcacgaacagccccataaaataggttaaccacagcgctatcgtgccgcgggcatagccatgccggaacagctgcgccactttgctgctccgcgtgatgggcggcgcattcagctggaaaacggtttcagccgtaaactggcccccaagccggttaagcgccctggcaatctgctcgcccggtagtcggcgcgccaccatgttcatcgccgactccggcaacatcacgatcataaaggggagcaccacgagcggcagcacgccgccaaaaaccagcgccgagtgccagctgtaatgcgataacaaaccggcggcgataaagccgccgaggccggaacccacgttaaaaccgctgtacatcagggtgatcatcacccctttacgccgctccggcatatattccgccaccagcgtgacgcagttgggcattacggcgccaaggccaaggccggtgagaaaacgcatcagcgccagttgcgtcgggctttgcgccacggcgccggccaggctgaacagcgcaaacagcgccaccgaccagagtaaaattcgctttcggccgtagcggtcagaaagcggacccgctaccagggcgccaatggcgacgccgaacatggccgccccaagaatcggccccatttcggcccggctgatgccccagtcttcgatgagcgccggggcgacaaagcccatcaccgcggcgtcatacccatccagcataatgatgatgaaacagagcagcagcacgttccattgaaagcgcgagaccgggcgggtatctatccacgctttcacatcgacaacgttcgtgtgattcatagggtgacttcctcaagcaggcggtacgaatgttctggttagtgttttttgagtggaactttcgtactcaacttaaggcaggtcacgcaggctgtccggttcgaaaatccggcgtcagatatgagttttatttataatgtgagggatacgacaaaaaccagccagcaaaaaacccgcagccaacggcggcgggtcagggcaagagcagcgtttagtgcttcggaataattaaatcgccgcgcagcgggctgccgcccgggttgtccgttttctcggtcagccagttgacgatccgcgacgccatcgcgtccatggaatattcaatcgccgggatagtcgggataccgggcagctgtaacgatccggcgaggctaaacaccatgacattttgcggaacggcgcggttaaacgcctgtagctgcggcaccacgcgctgcgcctgctgttcatcgctcaccagcagcgcgttaaagttcagcgtcgtggcgttattgaccagctcctgcaccgccaccgacggcgaggtgttatccagaaacaccaggttgcgattaaacggcaaaaagtttttttccagcgcgtgcttgtagcccagcagcacctggtcggcaaagccgctgctctgcggatgaatcagcgcaatctgccgtctcccctggctaatcagatagtgacaggcggtttcggcggcgaaagcatgatcgaactgaatactgttgtcgccttcgctatcgaggcagtccaccagcaccacgtccgggcggttaatattcagaggaaaacgcgcgccgatgattagcacgttatcgcacagcccgcaggtcaactcctccagagagttcatcacgccgtggctggtgttggcgaagcgcagcagcaggtgtttctggtgctggctgagctgtttttccagggcgtagagatagctggtggtttggttgatgttgtcctgggcgcagatgacgccgatgcagccggtggactggctgagcaacgactgggctatcatgtttggccggtaattgagcgcttccgccgcctgcagcaccgcctgacgactggcttccttcacgccacgtgagccgctcaacactcgcgacaccgtggctttggaaaccccggcaagtcgtgaaacatcattgattgtcgacatcattttcccctgcgcgggcgccgcgtcccgccaaaatcctgtaaacctgaatcgcttcaattatgaccagcgcagtatatccatttcgccatttgtttggaaaccgattttccatttcagcgcaaaacatcgccaaatcgacagaataatgtgagcgaaatccaataaatccgccctataagcaggagatcttgaccactatcacagttctgctttttataaatggaaaccggtttccgtctgatatcaaatcacccacgcaataactttttacattttgaggatggtcgtcgatgtacaagattatgctgtgctgctctgccgggatgtccaccagtctgctggtcagaaagatggttgaggcggcgaatgaacgtgacctgccggtgcagattgacgcctatggcgtttccgaatttgacatgcagtttccgcagtatcaggtggtgttgcttggcccccaggtgaaatacatgttgaaaaccctgtctgacaaagcggcttccctgaacattcccgttcagcccatcgatacgatggactacggtatgcagcggggagacaacgtcctgaattatgctctgtcgctgatcccagcggcgcactgagaggtgttgaaatgagttctctgtatcagtccatgattgccgtgatcgagcaatctattactccgctggcaggacgccttgggcagcagaaatacgttatcgctatccgcgatggcttcactgccgccttgccgtttatgatcatcggctctttcatgctggtatttatctttccgccgttttcacccgataccaccaacggctttgcccgcggctggcttgatttctcccagcactaccgcgaacagctgatgctgccgtttaacctcagcatgggcgtgatgaccttctttatctcggtcggcattggcgccagcctcggtcgtcagtttcagctcgatccggtgatgtccggtctgctggcgtttatggctttcctgctggtcgccgcaccctatgccgatggcaaaatttccactcagtatctgtccggtcagggcattttcaccgcgctgatcaccgccatctactccacccgcgtttacgcgtggctgaagcaaaacaacattacgattcgtctgccgaaagaggtccccaccggcgtcgcccgttcgtttgaaatcttgatcccggtgctggtggttattgcgactctgcatccgctgaatctgtttatcgaagcgcagaccgggatgatcctgccgcaggcgatcatgcatctgctggagccgctggtttccgcctccgactcgctgccggcgattttgctctctgttctgatgtgccagattttctggttcgccggtatccacggctcgctgattgttaccggcattatgaacccgttctggatggccaacctgtcggcaaaccaggcggcgctggcggctggcacggtactgccgcacgtctacctgcagggcttctgggatcactatctgctgattggcggcgtcggttctaccctgccgctggccttcctgctgctgcgtagccgggccacccatctgcgcaccatcggcaagatgggcatcgtgccgagcttctttaatatcaacgagccgattctgttcggggcgccgatcatcatgaacccgatgatgtttatccccttcgtctgtgtaccgatggtcaacgcggtgctggcttacggcgcgacgcgtcttggctggctgagccaggtggtgtcgctgacgccgtggactacgccggccccaattggcgcgtcgtgggcggctaactggaccctgagcccggtggtgatgtgtctcatctgcatggtgatgtcggcggtcatttatctgccgttcctgcgcgcttatgaacgttccttaatgaaaaccgaagttgagaaagccaaaaatagcgttccggtagcagaaaccgttagctaatccctctccttccggagagataataagatgatagcgtaataatgcagaaaatggactttcactgcattattaaataataaatacctcaggaatacacatgattgaattagaagatgcggtaatggaaattatcgttaatgcgggacagtcacgctcattatgttttgaagcgctgcatgcggcccgaatcggaaatatcgacgaagcgcgcttactcttaaacgaggccgacggctacgcccgccgggcgcatcagatgcaaacccagctcatcgggcaggatgccggtgaagcgcgtcagcccatgacgctgattatggtacatgcccaggatcatttgatgaattcgctgctggcccgcgagttctcagaagaattaatccatctgtaccagcgttaattaatatggaataacgttagcgagaatattattctccggcgtcgctgtaccctaaaaaacaaatcagcttattttggctatttattctagccagaatgggatggttattatctgaaatatattaattattaaagcgagataaccatgaatactgtaaaaaaactgcctttagccatggcggtggtcgccgcgctgtgcccaatttctgtcatggcgcaagaatttacgcaggaacagatcgacgccatcgtcgccaaagccgttgataaagcgctggccgaccgccaggcaaaaatcgacgccgcggccaacaaaaaggtcgacgtgattactaacccggaaaccaccgccgcctcgccggatatggccattccgttcggcctcaagttcagcggctacgcccgctatggcgcccacttccagaccggcgaccagaaatatgtcggcgtcgacggctcctataacggcgcctcggcgatcggccgtctgggcaacgaaagcaacggcggcgaattccagatcagcaaggccttcaaaagcgcgcagggggctatctgggatcttaacgtgatgttcgaccactggagcgacgaagttaacctgaagaaggcctacgtcggggtcaccaacgtgctggaatccaaccccaacgcctatatctgggccggccgcgacttccaccagcgtccgcaacaggggatcaacgactacttctggatgaaccacgacggccagggcgccggggtgaagaactttgatatcggcggcgtgcagttcgacgtggcggcggtctcgcaggtgaaatcctgtagtccggaagtgatggccgacgagaccaacccgtcgcgcatcacctgtaccggcagctccgataccggcgataacggccactacgcgctgaccaccaaaacccacaacatcaaggccgggccgatcgacgtcgaggtgtacgccaactacggctttgactcaaaggcggtggacagcgacgcgcgtctcgaagcctggcagggcgggctggtgctgagccacaccaacgacagcggggtgaacaaggtgatcctgcgctattccgacaactcggataacagcgtctataacaaaaccgacgacctgaccacggtctacgccagctttgagggcagccataagttcacccagcaggcgcagatcgaatacctgctggccttccacgactacgacaacggcaaggacaacaccgacaaccgcaaaaactacggcgccatcgtccggccgatgtacttctggaacgacgtgcactccacctggctggaagcgggctaccagcgcgtggattacgaccagggcggggataaccacggctggaagctgacgctgtcgcagaacatcgccatcggcatggggccggagttccgtccgatgctgcgcttctacgtgaccggcggccaggtggacaatgagcataccgcgaaggtgaacggcacccaggaccagcagctggattcgctgaacgtcggtgggatgtttgaggcgtggttctgatgcgatagcgttgccgaaggagcgttcccggctggcgctacgcttagccgggctacaactggtgcgctccatttatgccggatggcggcatacatgccttatccggcctacgttccttcctgcgggctccccccccaggaccggcaagcgcagcgccgccgggcagtcagacccgtgccctggtggcgtcatcaattctttatctctggcttaatcggcgggcgatgcgctcaagcttcatcatcaacagcagcgtgacgcccaccagcacaatggtcagcgccgagccatcggcgatattgccgcgatcggtgaggctgaaaatggtcaccggcagcgtcgtccagcccggcggatagatcatcaccgtcgcgcccagttcccccatcgacagcgataagctcagcgccagcgccgagatcatccacggcgtcatcagcggcagtgtcacatggcgcaggcgataccacggcgaagcgcccaggctggaggcgacgttttcaatatcagcggaaatacgcgccagcccggtcgttacgttgctgaaggtaaaggcggagatcagcacgaagtgcgccgccagaacgataaagaaggtgccgttcatctgcagcggcccctggctgaacgccaccagaatgcccagcccgacggaaaccgaggggatggcgctgggcagataaaacgccaggccaagatatttctgtagcgtcgcgccatactggcgcagcgccagcgccgcccacatcccgcacagcagcgccagcaggctggcgcagaagcccaccatcaggctcgaaaacagcgaatcccacgccgcgccgcgaaaggcgttaacaaagtgggcaaaggtaaagccggtgggcagcaggccgttccattgtttactcaggctggagagtaaaatcaccgccagcggcagcaggaaaacgccggcaaaaagcgtcaccgccagcgcgcccgccgccgcgcggcctttacacgaccaaatcaacatcgttaactccttacgccagtgcgcgccgccgccagccgatagagcataaacagccccagcgacagcagaatattgatcagcgcaatcatgcaggccacgctgtaatccgactccagaatcgccttgctgtagaccatcatcggcagggtattgacccctttggcgccaataaacagcacgatcccgaactcgttagtggtcaatagcaggcacaggctgccgcccgccatcagcgccgggagcgccgccgggaagataacctgggtaatcacccgtaacggatgagcgccgagaatactcgccgcttccagctggctcttatctatctgccgcagtcccgccatcagcgggcgcatcaccagcggcgtaaagacggtaatctccgccagaatcacgccgttaatcgaatagaggaagtctaccggcggcagttcaaaagcaaacagcgccatcagggtgccgttgagcagccccgccgagccgtaaataaaggtgaatgcgagagtgataagaaaggtcggcagcgcaataaaagtatcaatgacccggcccaccagttggctgccggggaacggaataaacaccagaatcagcgccaggacgctgccgagcaccagacagccaagggtagcgaacactgcaatctgtaaggtattgagcagcgcgccaataaagcgttttgagtcaatcacctgccagaaagtctcgaggctcaggttgccgctggcgtcacgtaatgcctgttcggcgatcaacagtagcggatagaaaaacagcgtcgccagcaccagcagcggcaatgccagccacaggtaagggcgtaggtttcgcgccggacgcgcaagcgtgagggtttgcgccatcattgcacctcgatcagaaccgcatcgccaggttcgaagtagagcgccagcttgtcccccgcgcgcggcagcgggttcacgtgggtcatcacaatccgcaccgcttcgccggcaacatcgcacagcagatgcgtcagatcgccctgccaatgtaccgaggtcagggtagcattgagacgattactggttgccgatcgcggcgccaggctcatgtgctgcgggcgaatgcataacagcttgttgttgccatgcaggccgccccggctgaaggcgttaatcaggccgccgccacagctcacgctaaccagccccggctcggggctgtctttcagcgccgtcgcctgcaggatattggcgcggccgaggaattcggcgctaaagcggttcggcggatagtgatagagctcgtgcgtttcgccgtgggcgattagcgagccatctttcatgatgccgattttgtccgccagggtcagcgcttcggtctgatcgtgggtgacgtagagaatggtcagttccggcagttcgcgatgcagacgggcaatctcttccaccatgttatggcgaatttgcgcatccagcgccgacagcggttcatcaagcaacagcacccgaggacgcacggcaatcgcgcgggctatcgccacgcgctgctgctggccgccggaaagctgatgcgggtagcgggtggcgtaatccgccataccgacgatttttaaggcttcagtcacccgctcggcgataagccccctgggctgcttttgcgcccgcaggccgaaggcgacgttatcttccaccttcatatgcgggaacagcgcgtagttctgcaccaccatcgccagcccgcgtttgtacggcggcagttgggtgacgtccgtatcgccgatcaggatccgcccgccagccggttgcacaaaaccggcaatcgcccgcagcaccgtggttttcccggaaccggaagggccaatcagcgccagcacctcaccgggctcaatggtcaatgacagcggttttaagaccacgttgccgtggtatgaaacgcgcagcgagtccagggtgatcccggacgtccccgccagcgacggggaagaagtgacggtggttttcatcaacatcaggcttactcgctatcggtcactttatgccagcgggcaatgtcagccgacagcgataccgcgacatcatcccagttcggctcccagctcttcacgccgtcgagcgccgctttcgccgccttaaagttagcatcatccggcgctacatcgctgcgtaccggcaggccccaggagcgcgcgctgacgctggattgcgccggtttatccagcaggaaattgatcagctttttgccgttttcgctgttcggtccgttctgcaccagcccgatggtgtagggcagcgccagcgcgctgcgctcgcctttgtcatccgccggccagaaaattttaacgttcgggttacgcgccatctgcgacaggttcatctgcagatcgccgttggcgacgtacagctcgcctttgttgaccagcgccgtcagcttaccggtcgaggccgatgggccaacgttattggcctgcagcttacccagatacgcaaaaccggcgtctttaccgccgaggctatggaacgcctgcagcatcaccgcggtaccgtcgcccgcctgacccggcgtggagtactgcaacttgttcttgtagcggctatccagcagatcctgccagctggccggcgcgcttttcagcaactggctgttatagatgaaggtcagatagttattcaccagcggcgcgtagcggtcgttagcgccggggatctgcgcgcttccctgcggggtaaaggttgccagcaattgctctttcgcggcgcgctggataaacggcggcaccgtgaccagcacatcagcctgcggattggtgcgctccttggccagacgttcgacgatcgcgccggagccgccttccacatactgcactttgatgcccgtcgctttggtgaaggcagcgaactggctctgataccagctgttatcgccgtcatgcaggccgtcggcggagtaaaccgtgacgacgccgtccgcccaaaccggagagctggtcagcgcgaacagggacagcagagcaagtcgggagagtttcatcgtgtaagcctcatcggatagtcagttattctggtgtagaccagatttagcttcacgctaccgggggtttatgacaaaacgatgaaagaagtgtgtcgaaggagttaaaacgagcgggatgcgtagccccggcacgcgctagcgccaccggggagatcaaaaaatttaactaataaaatcaatgggtatcgacttcgatccgcaggctgtcatgccgccagtattcaatatcgtaatcgagaatacgcccgtgctgatcgtaattcagcctgcgcaacagcagcgccgggcgcccctccatcacccccagcgcctcggcggcctgcggcggcattgaggtgggataaaacgacagatgcatactggtatagatcaggtcgtagtgagtttgataaatctcggtcagactgccgttgagatcgtggcgcagcagctcaggcacccgcgcgggcagacagtggttttcgcagtagcacaccggccggccgtcggcatagcgcagccgggtcagcaggtagacctgatcgaagggctgcagcgccagcggcgccattacgtccagcggcacggcagccaggcggccatcaagcagcaccgttttcggttcgcgcccctgttcgagacacagcttgtggaagttggtattttgcgtcggatccagccacagacgctccggcgtcacaaaccagccgcggcggtcggcgcggtaaatcacgccgctggcctccagctgcgccaggctctcacgcaccgtaatccgcgtcgtgttgaacagcgcgcacagctcgcgctcggaaggcagcttgtcgccgcttttgagggcgccgttttgaatacgcgcctgcagctgcgccttaatcatcaggtattgcggcatctcgccagagggtgatttcatgtttactcactgccacttttcgtgcgctcattatacatagccagatgaattttttgttgcagcgccacatttcctttgaccctgccccggctttgtctccatgataactataaatctggtatagaccaaatggtgagacaaatgacttcacgaaattacctgctgctgacccccggcccgttaaccacctcccgtacggtgaaagaggcgatgttgttcgatagctgtacctgggatgatgattacaatctcggcgtggtacagaccattcgccagcagctggtgcagttggctaccccggccgacggttataccgcggtgctgctgcagggtagcggcagctacgcggtcgaagcggtgctcggcagcgtcatcggcgaacagggcaaagtgctgatcgtcagcaatggcgcctatggcgcgcgtatgattgagatggcgcagctgatgggcatcgcctgccacccttacgactgcggcgaagtctcccgtccggacgcggccgcgatcgaacagatcctgcagaacgacccggcgatcacccatatcgcgatggtacacagcgaaaccaccaccggtatgctgaatccgatcgcagaggtggccgaactggcgaaacggtacgataaacgctatatcgtcgatgcgatgagcagctttggcggcattccgttggatatcgccgcgctgaatattgattacctgataagctccgccaacaaatgcattcagggcgtgccgggctttgccttcgtgattgcccgtgaagcggagctggccgcctgcaaaggccgttcgcgctcgctgtcgctggatctgtacgcccagtggcgctgcatggaggacaaccacggcaagtggcgcttcacctcgccgacgcataccgtgctggccttcgcccaggcgctgaaagagctggcgcaggagggcggcgtcagcgctcgccatcagcgctaccgcaacaatcagcgccggctggtcgccgggatgcgcgcgctcggcttccggccgctgctcgacgatagcctgcactcgccgatcattaccgccttttattcaccggatgcgccgcagtatcgctttcacaccttctaccagaagctgaaagatcagggcttcgttatctatccgggcaaagtatcgcaaagcgactgcttccgcatcggcaacattggcgaagtctacgacgccgatatcaccgccctgctggcggctatcgacaacgccatgtactggaaacaataaggaaccgccatgaaccgtattagcgcactgatccttgactgggcaggcaccaccgtagacttcggctctttcgccccgacgcaaatcttcgtcgaggccttccgccaggccttcgatattgagatcacccttgaagaggcccgcgtgccgatggggcttggcaaatggcagcacattgaggcgctgggcaaactccccgctgtcgatagccgctggcaggccaaattcggccgcgcgatgactgccgccgatatcgatgcgatctacgccgcgtttatgccgctgcaaatcgctaaggttgtcgatttttccgcaccgattgccggcgttgtcgacactatcgccgcgctgcgcgccgagggcctgaagatcggctcctgctcgggttatccgcgcccggtaatggaaaagctggtaccggccgccgccgcccagggctacgccccggaccactgggtcgccaccgatgaccttgccgccggcggtcgtccgggcccgtggatggcgctgcagaacgtgattaccctgggcatagacgatgtggcccactgcgtgaaggtcgatgatgccgcgccgggcatcagcgaagggttacatgccgggatgtggagcgtcgggctggcggtgtccggtaacgaattcggcgctacctgggaggagtaccaggcgatgtcgaaagaggaaatcgccacccgccgcgagcgggcggcaggcaaactgtatgccgccggggcgcattatgtggttgataccctggcggacctgccggaagtgattaccgacatcaatgcccggctggcaaaaggcgagcggccttaagcgggtgaattcaccttcactttggccgccaccagcaggccggtaaacagcatcaatatccctgacaacaccagcggcgacagcagccctaagtggtcaagcgcaatgccgccgaccgcggcgccgcaggtgttggccagctggatcaccgccacctgaatcgacccggctttttccgcctgatcggagagggaacgggtgatccacgttgaccaccccaccgggatcagcgcaaacgcgaagccccagataatcgccaccgtcgaggcgacgattttgctctctccccacagcaccagcgccaccgcgcaggcggtcagcaccagcggcgcaatcgccagcgccgctttcaccgaacgcttgagcagcaccgaggagagcgaggtgccgataaagctggcgataccaaagctcagcagcaccagcgtcaggccgtcgacatcaaacccggcgagggtcatgtacaccgggcgaatataggtaaagaaggcgaactgtccggcaaaggccatgaaaatggcgcacattccggccatcacccccggacgcttcagcagaccaaacatattttgctgctgagaagccgattcaccgggcagcgacggcagcgctttcagcacccagagcgtacacagcacgcccatcaccgccgcgccgttaaagacgttgcgccagccgataagcccgccaaggaaactgcccaacggggcggcgatcaccagcgcgattgataccgcgccgaagataatcgatagcgctttcggcaccacgcgcatcggcaccagacgcatggtcagcgatgcggacatcgcccagaaaccgccgagcgccaggcccagacaggcgcgccccagcagtagcagggtgaagctatcagcgaaagataccagcaggcaagaaagggtcagcagcagtgaaaacaggataaccacgtagcggcgatcggttttacctatcaccgtggtgataaacaggctggaaaacatcgcgacgaatgccgtcgtcgtcaccgactgcccggccatcccttcggagatgcctaaatccagcgccatcggcgtcagcaggctgaccggcaaaaactcaacggtaatcaggcaggcgacgcagaaagcaaccgcgaaaaccgccgaccagtttggccgcgcgagatcgcgtgcatggggtttggtttcatttgaatgactcatgagtgacctgcgaagaaagtggcggaaagctgcgcagtgtaacattttgtatgtgacgtacttaacgttttcgcaactcttctcgcttttcataagaggttgcgtagctgctcgcatgtttaaaaaaacgatgcttgctatcgctttaacaaatctcaggagaatttaatatagcaccatgtgctatacttttaacgacaggatgtcagcaatgcgtatcttcaaaaccaaatggttcgccagagaggctagctctcatggcatttccgacgacgagctctatcaggcaattcaatctgcgcttcagggcaaagtggttgatttaggaggaggggtttataaaaagcgactcaacaagaatcgcgatcgcgcaatcatacttaccaaaagcgcagagtattggttttatacctttctatatgccaaacaggatatggccaatatcaaccatcgcgaattaatggggtttcgtgagttagcaaaacactatgccaatctttctgaagagagaacgacggccttagttaaaagtaaagaattagtggagatttgcgatgacagcaaaaaataaatacaaaagcccggctttcgaagcgatccatagcgctgcgtcggggctattcagcgttggcgcaatcccacaggaaacaatgcgccattttgatgaatcatgtctcggtagcgtagccgcacttcaacccattgaaattaaagcgctacgtgaacaactcaatgttagccaacccgtgttcgctcgttatctgaataccagcgtgtctaccgtgcaaaaatgggagactggcgctaaacgaccgagcggaatgtcattaaaattgcttagcgtcgtacaaaaacacggcctgaaaatcctactgtagttattctgccggatggcgcttacgcttatccggcctacaagtgacgagtgcggaaaccgtaggccggataaggcgcagccgccatccggcacacaaaagcgatgaaccacaggccggataacaatgagatcagtgcagccagtgcacgccgtcttccgggagaaacaggtcgttgtagcgctgctgtaggttatgcaaatcgctcatatccggatccagctcgcgcagaaacccttgcgccaggcggatctgcgcctcggtgatcggcgccgctaaacgcgctttttgcatcaggcgataccagtaatgcaggtttttttcgctggcgtcgacaatcgcgacctgccagatcagcagcacctgggcggcgttctgcagatgtgcttcattcggccgctccaggtaacgcaaatactcattaccggcggtttttcccagctgatcgatcatcgattccagcgggacaggcgtgatgccgaggcgttcgctcaggcggcggatcgcgcggcgtgaatcagaggtaagcacccgaaatcccacaacaaacaccactaccagggtggccagtcctatccagatcatgcatcctctcatccaatcgcagcctgactatcataatgggaatttgcctgctgtcgactgtcgggcctggcataatgcgcaagaaataaaaaagcccggcgcgaaggccgggcaaggttaccaaatacctggtgaatcaggcggtctgcaaaatacggttctttttctcgcggcgaattttacgctcttcaaagatagccacgatggccatcaggcagatacagccgacggcggcggcgtccagcgccgcaaaggtgccggcccagccggtcaggccgaagaccggggtgccgtcggcgatcatcccgagacccagtttggcgaagctatcgccgatcagataggcgaaggtgcccttgatcccatcggcggcgccgatcgcttttttcggtacgaaaccgacggcggcgacgccgatcaacagctgcggaccaaacaccaggaagcccagcgcaaataacgaggccagatagacgtactggttgctggcgtgttggtaaaccccgagggtggcgataatcagcgccagcgcgatgcaggccaccagcgcgcggcggccgttggccagatccgacaaccagccccacagcagcgtgccgaccagcgcgccgacctcaaacagggtaaagccctgaatcgccacctctttcgacagcttcagctcctggaaggcgtacacggtggaccactgatcgataccgatacgcaccacgtagaggaagatgttggagaagcacagcagccagatcactttgtttttcagcacgtactcaacaaagatctgccacttggtcatcgcattttcttcggtctctttgtcctcttcgctgatcgcttcgccaaacagctcttccgccgtgccgaggccgtaggattccggagagtcgctaccgtagcgcaggccgataaagccaacgatcagcgcaataatcgacgggaagataaacatgccgatcacatggccgtcgaacagatagttggcgccaaacagcgccacgcccgccgcgcccgcgccgccgaggttgtgggagatattccagaagccgaggaaagtgccgcgtttgcgtctgggcgtccacttggtgatggtggaatagctgcacgagccgccggtgctctggaagaaaccgctcagcgcatagaaggcgatcatcaggaacaggctggtagaacccgcccccatgctggcgctaaagcccagcatacagatggcggagaggatcagcataaacggcaggaactgcttggtgtttttgccgtcggcataataagagaccagcgtcttgcccacgccgtaggtgatggagaagcccaggccaatcatccccagctgggtcatgctcagcccgtaggtggagatcatgtcgttctgcgcgatgttaaagttcttgcggatcaggtacatggtcaggtagccgatgaagaccaccagataggactgcatgaaaggtttgaaccacattttgcgccgcacatcgagcggcagatccagggtcggcttgcgcacctgattcagaaaggccagcatgggtatctcctgagctgattttttatgcctgcgtaataaccaggcattgtaaaaaccagcgcgccgtctggcctgagacggcgtccaggtaaaaccgggaaaatttcttagttttgtcccgttcgcggcgaaagggtgagctacatcacgcttcgctggcggtacgcggcgcctgcgcgtttaaaaacggcagcagcagcagcgcggaaatgccggcggcaatcgcaatcaccacgaagaatccggtccagtgccagatatccatcacctgcgccagcggccagccggaaagcgaggcgccaagataagcgaacaggccgacaaacccggttgccgccccggcggcttctttatgcgaacattccgccgccgccatgccgatcagcatctgcgggccgaaaacgaagaaaccggtagtgaagaagcaggccgcctgcatgacatagctggcgaacggcatcagccacaggccgccaaccgacagcaaaattccggcggcgaaaatcaggttcatcggcccacggttgccgttaaacagcttatccgagccccaccccgccaccagcgcgccgataaaaccgcccagctcaaacatggtcaccgccgagttagcggtcaccagatcgacgccgagcgtctccgacatatacagattgccccagtcgttaatcgccgcccgcaccacgtacaccagcacatagcacaacgacagcagccagatgtagggattggccagcacgtagcgggtcaggatcgctttacgagacatcccagcgccttcctgctgctgggcgatttccagcgcatcgtgacgccagtcacccacggcgggtaaccccaccgcctgcgggcgatcgcgcagccgccagcacagatacagtccggcgaggatcgccagacagccggcaatggtcatcccggcacgccagccgtagtgcaacgccgccgctcccaccaccatcgggatcagcgcgccgccgacgttatgcgccgtattccatagcgcccaccagccgccgcgctcggtccgcgaataccaggccgtcagcagtcgggcgcagaccggcgagccccagccctggaagaaggcattcagcgcccacagcagcgcgaaagcccatagtgaggaagaaaaaccgaacagaatattcaccaccccggtggcgataagccccagccccataaaatagcgggcgtcggagcggtcgctgacgataccggagaaaaatttcgacagcccgtaggtgatatagaacagcgtggccagcaggccaatatcgctgcgggtcaggacgttgctggcgagaatttccgggaccgcggcgttaaagcttttgcgggtgaaatagaacagcgcgtagcccagccagatggtcaacaggatatggcgacgccagtagcgataacgcgcatcaagctcgcgtttatcgctaatcggcgcagcgtccggcggggcttttaaaaaggcgaacatcggcgatcctctcaggcgtaacgcagcggtagattgacgcacacccgggtaccatgggtgcaggagatcgtcagtgtgccgcccagggcggtcacgcgctcgcgcatgccggtcaggccgaacccctgcagattcgaccccggcggcaggccgcaaccgtcatcttccagcaccagcattagtcgctcatcctgctgccagccctgcagagtgacagcgctggcgctggcgtgcttgacgatattattcagcccctcctggcaaacgcgaaacagcgtcacgcgctggttctcgctcagtcccgcctcgttaatccgccagtcgagatggctgacaatgccgcggtcctccagctccatctcgcgcatcaacgaacgtaccgcctgctccagcggcaggtcgtcgagctgacgcggacgcagacggcctagcagtctacgcaccgagtcgtaaactcccagcgacagctgttctatcagctgaccgctctggcgcacgctggcattgtccggcgccagccgctgtacgatcccggcctgggtgcggatcgcggtgatggtctggccgatatcatcatggagctcgcgggcgacgtctcgccgcacgctctcttcggtctccagcaggcgttcagccagccgacgattacgcgccagctcgctttgtaatgactggttcagctcgcgtaaccgctggatccccgcccccaacagcagcccggtgaggctctgtgccagcagggaaagcaataaatcgaccgggtgatcgtgccaggtctggctggcaatcaaggcgatagcgttcatcagggtggcgatcagcgcgccctgccagccgtagtgccaggcgagggcgataatcggcagcgccagacaaaacggggtaaagcgggagagctcggcgggcaggccaagctgcagccacaggctaatggtgaataacagcagataccagatcagatgccgcccgcgccagttaaccggctgcgccaccagcgccggccccagcggccgccagacggtgctggtaagatagtgccagaaaaccaggcaggtcggcgccagcgtcaggccgccggtcagcgtcaacagcagggcgttaagcccctcgtccccctccgccagccacggcagcgattgcagcagcgcggcggccattaacgccccgccctggcgcagcagcgtcagccagtcgcgctgctgccggtagcgcgagatcaacgccaccggcagcagagtcagcaggcttccggtcatcaaaattatcgggtgcgccagcgccacctcctgcgccagccagaagataagcagccactcggttcccagcagcactggccagtagccgcggggcattgcagcattaaccccagccgcaggccaaagggaaacagcagcaccgctaaatccgcgcgttccaccagatgcagactgatgctccacaggcagaaccaggcggccgcgaagataaaggcgcagccgatgaccgacagcaatcgtgagacgacggccttcattgccagctatcgaacatgcggcgcgccagctcaacgtcgttgctgacgcccagcttttccagcaggttggcgcggtgtacgtggacggttttcggcgacagaccgagctcggcggcaatctctttcaccgccatgccctgcgccagcttttccgccacctgacgctcgcgtttggtgagcggatcctggcgcccggcggccagcttcatggcgatatccggcgtgagatagcaaccgcccgccgccaccgtgcgtaccgcggcgataagttcatcggggctgcagcgtttcgacaggaagccgcgcgcgccggcattcaacgcttgctcgatcagcgccgggctatcgtgtaccgacagcatgatggtcgccatccccttcggcagctggctgagcagctccagcccggaaatatccggcattgagatatcgcagatacagacctgcacgccgcgccccggtagccccgtcagcgcctcgcggccgctaccaaattcggcgacaacctgaaaatcagcttccagccccagcagctgagcaaagccggagcggacaatcaaatgatcgtcaataagggcgatggtggtcatggtgtgtcctggtgcctgaaaacgccggatggcggcgtaaacgccttatccggcctacggattcactgcctgtaggccggataagcgcagcgtcatccggtaaaggcgcttaccttagcgataagcgcgtggctgttcaagccttgagcgctattcgaagaacaccgcaattttgttaaacatggtgggatcggactggttacgcgccactttggtgacatcttccagcttttcaatctggctaatcatctgccccagtcgctggtcatcatttaccagcagccagatgcggctgtgttcgctgccctgaattggcagacagagaatgccttcgacgttaaacgcgcgacgggcaaaaagcccgcacacgtgggtcatgacgccgggatggttgcggacggtgagttccagaatgacgttgtcacattgtttttgcatggcttattcccccaccatttcagtattggccgcacccggcggtaccatcggatacactttctgctgtgcgtcgatgcgcacgtggatcagcgccggccccggacggtcgatgatcgcctgcagcgccgcctgcggatcgacttcattatttaaatcacaggtttgcaggccaaaaccggcggcaatctgcataaagttaatcatccccggataggtggcggcaaaaacgccctgctgatagaacaggctctgctgctgatgcaccagccccagcgcttcgttgttcagcaggataatttttacatccagctgattttcggcggcggtggccatctcctgaatattcatcatcaggctgccgtcgccggagaagcagataaccttgcgctgcggattcgccagcgccgcgccgatcgccgccggcaggccgaagcccatggtgccgaggccgccggaggtcagccactggcgcggacgattgagcgggtaggcctgcgccgtccacatctggtgctggccaacgtcggtagtgatgatcgcttcatcatccacgcaggcggccacggcgttaatcaggccgtaatgggagagcgggtcgctttcctgcgggatggcgcaggggaattcgcgctgcaagtcggccaccagctggcgccattcctcgcgcggctgcgcctcaatctgcgggttcagctgggctaagacttccgccacatcgccctgaatcgccacgtgcggttgcttgattttgcccagttcggcgcggtcgatatcgacgtggataatcttcgcgttcgggcagaactgctcggtcttgccaatcgcccggtcatcaaaacgggcgcctaaaacaatcagtaaatccgcctcctgcagaatgaagttggtgctgcgcgcgccgtgcatccccagcatccccagcgacaaaggatgcgccttcggcagcatgcccagcgccattaaggtcatggtggtcggcaggttggctttttccgccagctcacggatcgcctgcggcgcgttaatcaccccgccgcccagatacagtaccgggcgtttcgccgcgttgatcattgccgccgcttcacgcacgctttcaggcgcgaatgccggtgccggggcgcgctcgccaggctcaggcagcgcttccagctcaatggtcgccgactgcacgtccttaggaatgtctatccacaccggcccgggacgcccggactgggcaatacggaaggcgtcgctgatcacctgcggcagctcggcaatgtcgcgcaccagatagttatgtttggtgatggggatagagatgccgtaggtgtccacttcctggaaggcgtcggtaccgatcatcgaggccggtacctggccggtgatgcagaccagcggaatcgaatccaggcgggcatcggcgatcgccgtcaccaggttcgtcgcccccgggccgctgcaggccatacagaccgccggcttgccttcggtacgcgccatcccctgggcgataaagcccgcgccctgctcgtggcgcgccaggatgtggcggatctgcgtgctctggcttaaggcatcgtagataggcaggatggagccgcccggaatgccgctgaccatagtgataccctggcgctccagtaaatgaacaaccagctgcgcgccggtaaagcgcattgtgtttgatgtggtgcccgaacttgccatgctccagtccttttcttctgggccgactttaccggggggctcgccaacaaaaaaccccgctcggtttgcgccggcggggtttggaattcgtgttgttccggaccctacggcgcattgccgacgacgaccaccacagacacgacgaccaccgcggctggcgcggtttttagtagggtcgaagcgatcagggttgcgttcattagggacctgttgtgtcgaaaaataagctgaatttatacaaacacaggttttacgttttcacaatggatttattttcatccacgaaaatttgcgcgaaagatcacagttcggcgcaaaagggcagaaaacaaaaaaccccgccggagcgaggtttttatcagcatggttacaggtggtagccgcaagcacactgtattacgtcaacgccaaaagtatacgcgatcgctgcagttcgcgcaatttaaggtcggtttttctctgtcatagagtatggatgagaggggcggatttgtccaaaaaatactgttcatccatacagtatttatctatactgggtgtgttcactttgtgccattcgggggccgcaagtttgaccggcgcaacgaagtcctggctgaaacgggtggtgccgtcagtgccttaaccccgggagagcacactgtgttacgtcaacaacgtgcagtcactggcccgcgcggcaacgcgtggctcagcgctgcgcacccctgtcgttgcaggcggcgggccgggaagccgttcatggaaaggacgaactatcggccagggcagacgccgccggcgacaggcagggataagctggcaacgggcagcggaaaggtacgtcagcttattgtgctccttaaccacaggagacgcgcgtatgggcggaatggatattattattttgatcctgaaactcatggttgctgtgttgcaactacttgatgcagtcctgaaacagttccgctgattcaggttcaagtcgcacctgaggggggcgggaaaccgcccccctgcaggcgcccgccgggcgtcccgggatgacttgatggaggaagctatgccacccctgttaattgccgccacgacgccggatgccccggggttcgcggcgctacgaattgaaagccttgaacagcatttcaatatgctgcgccgcctggcggaaaactggcagagcggcaaaaaccgctttaacgcgccgggcgaaacgctgctgggcgccttcgtcaaccaccagctggtaggggtatgcggcatcaatagcgatcccttcagtccgcagccgcgggccgggcgcattcgccacctctacatcagcgaacgctatcgtcgccggggcatcggccagcagctgctggtctcggttatcacccactccagcgcctggttcgactttctcaacacccatgccccggcgcaggcctggcccttttatgaaaggcttggttttcgcccggtgtacgatgaaccgcgggtgacgcatcgcctgttttgttcgctttaacccccgctggcaggcagcgcgggcgcgtgttacattccggtgaccttcactgttgaacctgtctgcgatgaccctcaccgtattctgcattttgctgttcgccgccctgctgcacgccagctggaacgctatcgtcaaagccagcgccgataaaatgtacgcggcgatcggcgtcagcggctcggccgcgctgatcgccctggtgatgctcccctttgccccgcagcccgcgctggtcagcgccccctatctgctggcgtcgtgcgcgttacaggtggtgtatacggtgctggtggcgaagacctaccaggtatcggatatgagccagacctatccgctgatgcgcggcactgcgccgctgctggtggcggcgataagcgtgctgttcctcggcgatcgtctgtcgccgctggcctggctgggtatcggcgtcatctgcctggcgattctggcgatggcctttaacggccgcgccagctcgcgcaaaggcatcgtgctggcgctgatcaacgcctgctttatcgccggttatacgctggtggacggcaccggcgtccggctggcgggctcggcgctgggctacaccctgtggaccttttttatgaacggcttctgcctgctgtgctgggcgatggtggcgcgacggcgtgaggccagtcgttatttacgtcagcactggaaaaaaggcatcctcggcgggatcggcaccatgggctcctacggcctggcgctatgggcgatgacccaggccccgctggcggtggtcgccgcgctgcgtgaaacctccattctcttcggcgcgctgatcgcctttatcgtcctgaaagagcaactgatgccgctgcgcatcgtggccgcctgcgggattgccgccggggcgatcctcctgcgcctggcgtagcctgagatggcaacattagttgccgttcctgtttacataatctgcctggaattccctcaacaatcggcactttgcagttgttctgtcattttaatatggtagattcctccatcgtttacgggatgtgccagtcacatattcttcatttctctttactcacaaagtattcatcgacatgaaacggcataagaacttcaatttgttgttgatgctggtactgctggtggccgtcggccagatggcgcagaccatttatattccggccatcgccgacatggcggtcgcgctgaacgtccgcgaaggggcggtacaaagcgtgatggcggcctatctgctgacctacggtatttcacagctgttctacggcccgctctctgaccgcgtcggtcgccgaccggtgatcctcgtcgggatgtcgatttttatgctggcgacgctggtagctattaccacccatagcctgccagtgctgatcgccgccagcgccatgcaggggatgggcaccggggtcggcggcgtgatggcgcgtaccctgccccgcgacctgtacgaaggcgctcagctgcgtcatgccaatagcctgttaaatatgggtattctggtcagcccgctgattgccccgctgctcggcggcatcctcgacaccctgtggagctggcgcgcctgctacgctttcctgctggtcctgtgcgccggggtgaccttcagcatggcgaagtggatgccggaaacgcgcccggaaggggcgccgcgcaccaaacttctggccagctacaaaacgctgttcggcaccggcgcctttaactgctatctgctgatgctgatcggcggcctggcggggattgcggtattcgaagcctgctccggggtgctgatgggcgcggtgctcggcctgagcagcatggcggtgagtattctgtttattctgccgatcccggcggcgttcttcggggcgtggtttgccggccggccgaacaagcgtttcccgaccctgatgtggcagtcggtgatctgctgcctgctggcaggtctgatgatgtggatcccagggctgctgggcatcatgaccgtctggaccctgctggtgcctgcggcgctgttcttcttcggcgccgggatgttgttcccgctggccaccagcggcgcgatggagccgttcccgttcctcgccggaaccgccggggcgctggtgggcggcttgcagaatatcggctccggcgtgctggcctggctgtcggcgatgatgccgcaaaccggtcagggcagcctcggcctgctgatgatgctgatgggcctgttgattctgctgtgctggctgccgctggcctcgcgcttcacccaccatcagcagccggtataagcgcggcagtggttcaccggatggcggctgacgccttatccgggctaccggactggtcgtctgccggcccgcgcaagcgcagtgccgtcattttgccgggtggcggctcacgccctacccggcctccctaacaacaccgagggatagcccggctcattttcaggtcaggctatgcagccactcgataaaggcgtcgattttcggccactgacggcccggcagggtgctcacgtaataatgctgatggcatttcagcgtcatatcgccgaacggggcgatcaactccccactctctaaccgcttctgcaccagccgtttacgccccatcgctaccccgacatgattcatcgccgcaatcaccgctaaatcagaacgatcgaagccaatgcccgacgattgcggcagttcaatcccaaattgttgtgcccaactgaaccattcatcggtgccggaatcattgctccatgcctggcgatcgtgaagcagcgtacagtggcgcagattggcaggatttgacgttaactgcagctggcgggcgtaatacggcgtacataccggcacgatcgcctcatccatcagaaaatggtggcttagctgcgacgacggcgcgtcatcaaaatagattgccagatcgatacccgcccgctgcaggttgacgttatcgttgccggtcagcacggtcagcgagatggccgggtagcggcgactgaaatcccccagcgccggcaccagccagcactgggcgatagagggccgcgagtagaccgtcagactgccggagagctcctggtttttgatgtccagaatctcctgattgaggccatccagcgacgacttcagcgcccagtaaacgcgtttcccttctcgcgtcagctccactttgcggtgcgagcggacaaagagctggatccccagctcctcttccagctgattaatccggtgactgacggcgcttggggtgagcgccagctcgtcggcggcaagggcgaacgactcgtgccgcgccgccacctcaaacgtcgacagcctggagagttgccagccgttcagcaaccgggtacctaaggtttttagcacatccattatgcgctcctggcgataatagggagtctggatgataaaaaaataatgccggaacttccgctaaaggatgagttaatttgacccatagcatatttagaggtcacttttagagctaaatcacctttttgatttaatttggctcatctgaaaggtcatttatatcgtttgtcagcccatgccgagtttctgttcaataaccacacgttacttacggcgaggtggggtatggaatcgcaaatttgggttgtgagcacattgctgattagcatcgtgttaattgtattaaccatcgtcaaactgaagtttcatccgtttctggcgctgctgctggcgagctttttcgtcggggcgatgatgggaatgggcccgctggagatggtcaacgccattgagagcgggatcggcggtacgctgggcttcctggcggcggtgatcggtctcggcaccattctcggcaagatgatggaggtctccggcgcggcggagcgcatcggcctgacgctccagcgctgccgctggctgtcggcggacgtgattatggtgctggtcggcctgatctgcggcattaccctgtttgtcgaagtcggggtggtgctgctgatcccgctggcattctccatcgccaaaaaaaccaatacttcgctgctgaagctggctattccgctgtgtaccgcgctgatggcggtgcactgcgtggtaccgccgcatccggccgcgctgttcgtggcgaataaactgggggctgatatcgggacggttatcgtctatggcctgctggtcggtctgatcgcctcgctggtcggcggcccgctgttcctcaggctgctcggcaaccgcctgccgtttaaaccagtgccagccgagttttccaacctcgacgttcgcgaagaatcgacgctgccgtcgctcggcgccacgctgtttaccgtgctgttaccgattggcctgatgctggtgaaaaccgtcgctgaactgaatatggcgaaaggcggcacgctgtatacagtgctggaatttatcggcaaccccatcaccgcgatgtttatcgccgtctttgtcgcctattacatgctcggcatccgtcggcaaatggggatgggcgttctgctgactcataccgaaaacggctttgggtccatcgccaacatcctgctgattatcggcgccggcggcgcattcaacgcgattttgaaatccagcggcctggccgatagcctcgcggtgatcctgtcgaaccttgatatgcacccgattttgctggcctggctggtggcgcttatcctgcacgccgccgttggctccgccaccgtggcgatgatgggcgctaccgccatcgttgccccgatgctgccgctttatcccggcgtaagcccggagatcatcgccattgccatcggttccggcgccattggctgcacgatcgtcaccgattccctgttctggctggtaaaacagtactgcggcgccagcctcagtgaaacgttcaagtactacacgacagcgacatttatcgcgtcgctacttgcactggccgccaccttcctgctttctttcattatctgagcgcaaagagacgtatgatgaaacacgctgacctgaccaccttaaccgcgaccttcccgcttgtgcaggatctgatcgccctgaaagaaaccacctggtttaacccggcaaccaccaccctggcgaaggggttgccttacgtcggtctgaccgccgacgatgtgcaagacgcccatgcccgccttcagcgcttcgcgccctatctggcggcagccttcccggaaaccgccgcgagcggcgggattatcgaatcagaagtggttgccattccggcaatgaaacgcagccttgagcaaaaattcggccagccaattagcggcgaactgctgctgaaaaaagacagccatctgccgatctccggatcaatcaaagcgcgcggtgggatttatgaagtgctgacccatgcggaaaagctggcgctggaagccgggctgctgacgaccgcagacgattatcgcaaattgctgacgccggagtttaaacagttctttagccagttcagcatcgccgtcggctccaccggcaaccttgggatgtcgatcggcatcatgagcgcgcgcattggttttcaagtcacggtgcatatgtccgccgatgccagggcgtggaaaaaagccaaactgcgcagccacggcgtaacggtggttgagtatgaagaggactatggcgtggcggtcgaacaggggcgcaaggcagcggaatccgacccgaactgcttttttatcgatgatgaaaactcgcgcacgctgttcctcggctatgccgtagccggcgagcgcctgaaagcgcagttcgcgcaagcaggacgcgtggtcgatgccgatcatccgctgttcgtctatctgccgtgcggcgtcggcggcggccccggcggcgtggcatttggcctgaagctggccttcggcgaccacgttcactgcctgttcgccgaaccgacccattcgccatgcatgctgctcggcgtctataccgggctccacgaccagatagcggtgcaggatttaggcattgataacctgaccgcggccgacggtctggcggtcggcagggcgtccgggttcgttggccgggcaatggagcgcctgctcgacgggttctatacccttgacgaccagacgatgtatgacatgctgggctggctggcggcagcggaaaatatccgccttgaaccctccgcgctggccgggatggccggagcgcagcgggtctgcgccagcaaagcgtaccatcagctgcaggggctgagtgagcaacagctgcagcaggccacccacctggtgtgggccaccggcggcggcatggtgccggaagaggaaatggcgcagtacctggcgaaggggcgctaatctttagcgcagcagcggcatcagcgcctctggcggccgctgctgtcgccgcaggtcccgcatcactcgcatatagggcccgctaaaatcgtagaactgccggtaacccgcgcacagcgggtcttcctgttcgccacagcggcacaggcgcagccacgggcagccgtagcaggtgctgttggccgccggcgcgcctggctgggtcagcgtctcgccgcaccaggcgctcagcgtctcgctaaacagtaaaatattgatgcgcccaatatcttcccgcacccagcggtgaaagactgcgcagagaaactctccccaaagcgcggcgtcgccggccgccagctgcggaataaaatggatagcggtgagcccctgttgacgaagctgcgcatagaacgcctgcggttgatggcaatgatgcgcctccaccacgacagcctgaaagggagtgtcatgttgctggccgggggcatgagtgagaggcaaattcgccggacatcctgtcatgacatatccctaatgaataaaacgatcggttgaaggtgagtaacagcaaacaggaatgccagagaaagtactgcgagtgcgatcaaaaatttgtcacgaaccgcccgcggctgtaaaaaatcgctatcgtcgacatccatcagatgacgacggcgggtatagccccagaggatcaccgccacaatcgccagtacgccgatcgacagccagaacggcaggccggcgcggtgccagctgtgcttaatcgccagcgccatcagcgcgccgtagcccaacagggtgcgaaaccaggccagcgaggtgcgctctggctgaagaccgggatcgctttcccgccgcgcccggcgtttatccgccatacaccaccagcagcatcaccgcggccaccaccgccagcagcagaatgctaatcaccagcagcgtgcgggtatagggaaggtcctgcttgaggcgcatcgccttctcgttattcagccagcgcagatagccatagatggccatgccgccggcaaagagacacagcagcagggcgagaatttcacggatcagcggcgtggcaaagtccggcgctaactggtcaaggccgacgccggcggcgagaaaaccgagcgccgtgcggatccatgccagaaaggtgcgttcgttagccagcgaaaagcggtaatccggcgcttcgccgaggcgggagattttcattacagttccttgttcatcgcgctgcaggcttcagcatagcgtaaatcaggaaccggggagaagaaccggcgccccgcagggcgccggtattacaacggggattaatgcagctcaggccagtaatctttgttggcggcaatgaggtcgtcgaggatcgctttcgccaccgaggcgctcggcacggttttcgacagggtaatcgcctgccacagcttgtggtacgagcgctgttcccaggcatcgaccaccagtttttccactgccacctgctggctcatcagccctttctggaaatgcgggatgtcgccgaccgtcagcggctccggtccgttgtggcctaccagacaagggatctccaccatcgcgtcggcgtcaaagttatggatcgcgccattgttcggcacaatcagcagcatcctttcctgcgtgttaaaggcgatagccgtcgccagatcgacgatataggaggcatgctcgtcaatctccagatcgccggcggtggatttcccggcggcgatgatcgcccggcaggcgctgaagacgtttttctcccgatgatccatcacctcattggcgcgggtgcgttccgggttggagtgggctaccacatagtccgggaacagataatatttcaggtaggtattcggcatggtctgcggatccagcgcctgcacatctttcgctttggcaaaggtgtcgttccagctggcctcggtgtgcggatcgttcgagggcggcacatagccgtatttcgccacatattcgcgcagtttcggcatcaaatcattgccgtcgaggtcctcaatcgaggtccaccagccgaaatggttgaggccgtagtagcgcacgcgcatctgtttacggtctttgaggccgacaatctgcgccatccgcccttcaatgccgatcggcatatcgcagatgttgaggattttggcgttcggccgcagacgacgagtggcttccgccacaatcgccgccgggttggagtagttaagcatccaggcgttcggcgaatatttttccatataatccaccagctccagcacgccgccgatagagcgcataccgtaggcgatcccgcccggtccgcaggtctcctggcccagcacgccgtggcgtagcgggattttctcatcctgttcacgcatcggatatttcccgacgcggatatgcgccatgacaaaatcaacatcggtaaacgccgcctgcggatcggtggtatagctgaattcaatctccggcgcctgctctttgaggatcactttgcacgcctcggcgatggtctcctggcgcgcgccgtcgttgtcgtaaaatttcagcgaccgcagcggaaaacgatcctggtttgccagcagcatcaggacaatgcccggggtgaaggtgctgccgccgcctgcgataacaactgagaattttttcatgatactgcctccgtcatggtggtatgttcggtcgaaagagaatctttcatcaggttttccagctggtcgcgcacctggggaacgtgcaggccgacgatgacctgaatcccgttgccgcggcgtactaccccgtgggcgcccagcgctttaaagacatcgtcactttgcgttttcgccatatcgaccagcgcgatgcgcagtcgggtggcgcagttgttgatgctttcaatgttgtcggcgccgccgagggcctgcaggaagccagcggcctgacccagccgggtctctggcgcggcggcggccgtggttttacctcgtgccgcctggtaatcggccttgctgtagagcttgatttcgctctcttccctgccaggcgtcttcaggttcagacgcaggatcagggtacggaagactacgaagtagagggcggtgaaacagaggccgatgcctatctgaatgaacatcatcgaagcgtggtgatggaacattgggatccagttttgcggcaagaattgatcgagcaggccgccgccgaagttgcctactaccccgcagatgtacatcaccgtcgccatagtcgccgccagcaccgcatgaacggcgaacagcagcggcgagatgaagaggaaggtgaactccagcggctcagtgatcccgaccagcatcgcggtcagggtggcggggatcagcagtccggcgaccttgacgcggttttccggcgcggcggtgaagtagagcgccagcgcaatccccaccgacccaaacactttcgagttaccgtgcagggcaaagccgccctccgggaacagcgtcttcagcggttccgtactctgactgaacgcctgcagatgctctgcccagtagacctgcagtccgccctccaccaccgcagggccaaagatgaacgggccatagacgaagtggtgcaggccggtggggatcaggatgcgctcaaggaagatgtaaacccacaccccaagcgccccggctgagcgcagaaaggcctgcagcgattcaatacccagctggacctttggccagccgagcagggtcagccaggcgcaagggatcatcgcgaggaaggcgacaatgaccacaaacgatgaaccctgaaagatgccgaggaataccggcaggggtttatcgaaatagcgattgtgcagggccgtcaccagaccggagatgacgatggcgccgataatgctggtgtcgagggttttaatcccggcaatcatcgtcaggccgctgccggccgtgggttcagcggaaaaatcgacgccgaagaagtggccccaggtcatccccatggcgttgataaagtagttccaggtgagaaagctcaccagcaccgccagacaggcccggccctgggcctgtttcgccaggccgatcggcagaccgacggcgaaaatcagcggcatattacgaaagacggtccagccgccctcctcaatgatgtgaacgatctgggcaaacaggctgtcgggtgcggtcagcgcttcgccgacgaacatcgggttgcgcagcatgatggcgataccgaccacaatcccggcaaaaggaaacaataaaaccggggtaaacatggcgccgccaaaacgttgtatttgactgagcattgggaaatcctcatgtaacaactcgtagggtgagtggccttctttttcttgattaccggcctgactggagaataaaaatttgcccgtccgacaacatgccgcgccgttgcgattcgtgatcccattcatggttttaatttggccaaagttgtctacttcgataacaaaagttagacatcgataagtcaggcagcgaaattaactaaatgaatgtgtcttaattgattgtaattaatctatttttttagaaaaaagagcacaaagcgacatccccttttcctgcacaagaggactactggtgatctacaaatccattgctgaccgcctgcggctgcggctgaattccgccgacttcgccatcggcagcccgctaccaggagagaaaaaactggccgaggagttcggggtggcgcgcatgactattcgcaaagccatcgatctgctggtggactggggattggttgtgcgtcgccacggctcgggaacttacgtggcgcgtaaagacgtccatcatgaaaccagcaatctgaccggcctggcggaagtgctgcgcaagcagggtaaagaggtggtgagtcaggtgctggccttcgaggtgatgcccgccccgccggccatcgccagtctgctgcggattaaaattgatgaacggatctacttctcgcggcgggtgcgctacgtcgacgacaagccgctgatgctggaggatagctatatgccggtgaagctgttccgcaacctgtcgctgagtcatctggaagggtcgaaatttgattatattgagaaggagtgcggaatcatcatcagcgggaactatgaaacgctgacgccggtgctggcggacaagcagctggcgcgctcaatgaacgtcccggagcagacgccgctgctgcgtattacctccctttcctacagcgacagcggcgagtttcttaactattcggtcatgttccgcaacgccagcgagtatcaggtggactatcacctgcgccgcgtccaggcgcaaagcccgctagctcagtccccagaacagcacggcgagtagctgcggggtgataatgcgcaggaacatcaccagcggatagacggtggcgtaagagagcgccgctgcgccgctggtggcgtgcaggttgttggcgaaggccagcgccggcgggtcagtcatggagccggccagcatgccgcacagcgtcagatagttcattttcgccagcatgcgcgcgaggatgcccaccgtcagcagcgggatggcggtgatgaaaatgccgtaagcgatccagctcagaccatcgccctgggtcagggtggcgacaaagtccccccccgattttagcccgaccaccgccagaaacagcactatccccagctcgcgcagcgccaggttggcgctcggcggcataaaccagtacagcttgccgatactgccgatacgcccaaggatcagcgccataatcagcggcccaccggccagtcccagcttcaatgctgcagggaagccgggaataaacaacgggatagatcccagcagtaccccgagtccgatgccgataaacaccggcagcatctggacctgctgcagcttctgctgagcgttacccagttcggcggccacggcgtcaattgcctccggacggccgaccaggttgaggatgtcaccaaactgcaggctggcgctgctgctggctaccagctcgacgcctgcccggttaagccgggagatcactacgtcatagcgctgtttgacgtgcagatcgcgtattttcttccccagcactttttcgttagtgaccaccacccgctccactttcagatcggtgccgcgcgtcgacagcgaggtggccacctcctggcctatcaccagctgcgcattgtgcaaatcctcaggtcgccccaccaggtgcagcaggtcgccagcctggataagggtgcccggcgcaggcaccatcaacagctcaccgcgtttcagccgcgaacagacgatgttgtcgttgttgagcatcggcacatcctgaatcgccatctggttgaggttggggttttccacccgcacgttgatggtgtgcaaatgagcgtggccgttaccgctgctctcctcaaaccgctgggcctctttctcgacattgatgcgaaagaacagacgcaccagccacatggtcagcagaatgccgcagatgccgaacggatacgccatcgcatagctcatccccatttgatcgaccacctcgaacggtacgccgagatcgcgcagaatttgctgcccggcccccagcgccggcgtgttggtcaccgcgccggagaagataccgagcaccaccgggagaggaatattgaacagcttatgcagcaccgcggtcaccaggccgccgaggataacgataaggatagcgaacagattgagccgcaggcctgagacccgcagcgaggcgaaaaagcccggccccacctgaataccgatggtgtagacaaacaggatcaagccgaattcctgaataaaatgcagcatcgggctgctgagggtgacccctgcctgatcgacaaagtggccgacaataatcccgccaaacaggacgccgccaatgccaaagccgacgccgcggattttgacattgccgatccacaaccccactaccgccaccagcgccagcacgctgaccgtcaatgctatctcactcatggtaccgtccctgtgaataacaccattaactacagggattatgaccgctgccaggtggattgtatgccgcctggcgcacaataatcatggagtaagatacgctactcaggcgcgttcttatttttcgctgcgatagtgagttgctgaatacttttctccggggaaggaagtgcttcaggcatagtgccacccaggtctttaatagtctggcgtactttttgccctacgtcataatgcgttttgttggcgagttgcttcgaatcaaccgcgtcccgacgtagtttttcttccgtttgggtagcacgaaacaggttggccgcgagctcagtcgatcccatatagtcgagtattttttggcttttctttaggcccttacgctcatggattgctttttggtcaagaccaccatagagacctttataaccatggttttgaaagacagcaaaatcaagagtcgtctcaacaccagcacgttgggccgtttcaaccagatgtttattatgctctttgagctcattgtgcaggaacagtcgcttttcatcctctcgtagagacttaaatatttgatcatcttgcaattcctggcgccgggtttgcaaggcaaagtacgtttgccccgcagcaatcaccggtttcgacggatcgccattttgcactaccagatagcaggcgtagcgtgagaggtggaaatcttcaagattcctgctggcgccagaacctaattcgaccattttgttggtttcaacaaaatggtctgccgagggatgaccactcgcctcacatgaaattatcgcttttgcaatgaccttataaaaattccgccactctttatagtcaagcaggggaccaaggttgcgggcagaccaatactcccgccccgcctcatcgctctttctaatcgcttcaaatggctgctgttcgttcataacgtatccttgtttgagtgagtcccaaagtatgattgttttttaaactgaaacacccgttgcagcaaggaagtttattgtgctctcgcacacaaaaaagccccgaaaatcggggccttataagttattcgcttaattaactatttaatgccggtcgttcgctgatggcgatacgctgcggggcgatctgctcaggctcattgcgggtcagatcgatatgcagcaggccattggtgaaggtcgcgccagagacctccatgttgtcggcgagggtgaagctcaggctgaaggcctggctcaccaacccctggtgcagccatgtggtctctttttccggctgctgcggcgtgcctttcaccaccagacgggtgccttccagttgaatatccagatcttcctgacggaaaccggccagcgcaagggtaatgcggtagtggttatcgtcgcttttttcgatgttatagggcgggaagctttggctttcaccggcggtttgcagggcgctggccagtttgtcaaaaccgatccattgacgcagcaggggggataaatcgtagttacgcatactgttttctccttctaagaagcgagtgaatacctgcgaattctgtaaattcgcatctgctccctgacggcgagcaggttgttacatcaggccgccacgcggcctgaaacggacaattagttgatttcgatgcggcgcggcttgttcgcttccgggatcacccgttccagatcgatatacagcaggccgttcaccaggttggcgccgcggacgtgaatgttttccgccagctggaatttgcgctcgaagttgcgctcggcgatcccctgatacaggtaggtccgctctttctgctcggcggcgtgggcgcctttgacgatcagcagattgtcctgggcagtgatctccagctcgctttcagcaaagccagccaccgcgatagcgatgcgatagtggttttcgtctaccagctcgacgttatacggagggtagccgccgttgctctggctttgattgttttccagcaggttgaacaggcggtcgaaaccaatggctgaacgatatagcggggaaagatcgaagttacgcatagtaaatagctcctgaaaatcagcgagaatcaaatgaccttccatcgtggacaggccgcggtaatccggaatacccctcaggcgtattctcagtgggttacacctataaaatgggtttctccccgtccttttcaagggattgagggcaattttttttgcagtttatcgatgattgcttagactgggtggaggagcacaaaaagcaaagtgcgatgcccgccacagtgcggcgcaataacactatgcattcacgggatggcccgatataaccgctgaaaggttatctcaacgcccgaaacgacaatggaagaacaatgaaaagcagacgactgttaaagctggtcctgttcagcgggataataagcctgagcggttgctccagcgtaatgtcacataccggtggcaaagagggaacctatccgggcacgcgatccagtgcgcaaacgctgggggacagcgataccaactggggtgtgaaatcgctggtggcgctggacatgccgttcaccgccgtcatggataccctgctgctgccgtgggatatgttccgcaccgacagctcaatcaaatctcgggtcgaaaagagcgagaaggctacgctggcgaccaactcggtgatcccgccagcgccgatgcctgcccagtaagttatcgtccggtctgcgtaacccacagctgacgataaccgtccacctcctccatccaggcaatctgtttaccgtctggcgaaaagacgatcgcgtccgccgagggcgcatgcgcatgcgtatcggttaaaaaggtgatatctcccgtaccggcatggcagcaggcaatccgatcctccagcgcaaaacccagccactctcccgacggatgccagttaaacgccgactggatacccgacgcgtgatgcgtcaactgccgcggctcgcccccctgcggggaaataagccacagctgcactacgccggcgtcgtcgcgcatcagaaaggctatcgccgtcgcctggggattggcgcgcacccagtggcgcgggacgttcaccagtcccgggtagcggcgatggtgggtgaaggtcaaacgacgctggctgacgcccgccggcggcgccggcattgtggttgcggtaccggccagcggcgccccgccaggctgcttccagccggcttcatcctgcggcagatcgacaataaacagctcaggcactttatcgccattttccgccagcgtatcgccaataaacgccagagtatggttcccgacccagccctcctcataggcgcgattaatctcatcgctgcccggcgcgggtgccggcgtcgtgcggcttaccagcacgcaccagtggctgccgccatattcgcgcggatgctgtccctgcggcgtcaccggtccatagggcgccgccacgccgacgttgcgcagatccagcgccggatcgcgctcgtgcagcacgtgatcgttgtaggtaaaactgacaaactgaccgttggggctatagacatggacgtggctgccgccgcgcagcgcgccgggcgtgtaggggggggtaatgtccatggcgtccagattctcgacagccccctgaaaggccaccaccccgcggcgatgatgaaaatcatactgccactgcgcatccggccgctcggggccatgaataaacacatagcgctcctgggttggatgcacggttaccacgcccacgtgcgcgccctgcgtggcacgataaatggtctccacagtaccgctgtttacgttcactcgctcaatggtttcgccggtaaacgatgcgccggacggacgaacgtcgaataccagccactggctgtcgggagtccaggtattaatattggtaagctggtgatgacggggagcaaaagtgacttgtttcatgacgataccctgatgcgagacttacgcatcagggtagcgtatcgcaaaaaattagcctacacgtttcacatcgccgaccagcaggatataagacagcgcgcctattaacgccaccacggagatataaaccagcgccgggccaaagccgtaatcctgcgccagatagccaatcaccagcgggacggtgatgccgcccaggccgccaacaaagttaaacaccccgccggtcaggccgatcaggcgcatcggcgccagggaggagaccagcgaccaggtgatagacgcaaaaccgttaccgaagaacgccagcgccatcagcgccatgatccagatggggtcgttggtgtagtttgcccccatgatgcaggtggagatcaacagtccacagatgatcggcgttttgcgcgccacgcccagcgagtagccttttttcaccagcttatccgccagccaaccagacagcaggacgccaaaaaacgcggcgaggaagggcaccgtggtcataaagccggccttcagcgcggtgatgcctttttcctgggttaagtagttcggaaaccaggtcaggaagaaccacagcgtcgaggttaccgcgaactgtccaaggtaaacgccaaccagcttgcggtgaaaaaccagcttccagtccgctttcgataacggttgacgcgcctctttcttcagcggcgcatcgccatccaccaggccgccgccgtcgcggatatagtcgagttcggctttactgatgcttttagtcaggcgtggcggttgataaaccttgaaccagatcagcgaccagataatgccgataccgccggtaacgataaacacccagtgccagctcaatagctcctggatccagatcagcagcggcgtgaggaaagccagacccacaaattgccccgaggtataaaacccgacggcggaagcgcgctcgtgctccgggaaccagctggtcaccatgcggttgttggtcgggaaggctggcgcttcgaagatgccggtaatggcgcgtaaaccgataagcgacattaaaccggtggcgaagccttgtagcaacgtcgccaccgaccagccaaatatagcgataaagtaggtaagcctggatcccacgcggtcaaggaaccaaccgccagggatctggcagagggtatacagccaggcaaaggcggaaaatacgtagcccatttccgctttgctaataccaaactcctcctgaatatgcgccgaggcgacggcgaggttggcacggtctacataacaaataaccacggtaataaagatcatgatgagcgtcagataacggcgacgcccggtttttacagcggtaactgaaatatccatcgcaatctgtctccagattttgggcatagcgaagccgctcaccatgcccggtaatttacagagggtgtttttgttttttattaataactatgttgcgatgcgctaaataattcgtgctggggaaaggcggcaaattttcgcatccctgggagcatacaatagtatgtgaccagggtaagaaaatgcagccaacgcatcaccagtgcgaagtatgacgcgcatttaccattcggcgacagatccatcctcataccgccacaacggatttcgccagtccggcgcgtttttacttaactcaatcacgcgggcctcatcaatttccacgcccagccccggcttcatcagaggtttaaagaagccgccttccatattgaaatcttctttgtttttcacaaaatcaagcagttcggcgcctttgttgtaatggatccccatgctctgctcctggaagaccgcgttatgcgaaacgaaatcaacgtgcagacaggctgccagcgcgatcggccccagcggacagtgcggcgccagcccaacgtcataggcttccgccatgccggcaattttatagcattcggtaataccgcctgcgtgcgacagatcgggttgtaaaatagccaccccgcccgcttccaggacccgtttaaattcaaagcgcgaaaacatacgttcgccggcggcaatgggaatatgggtttgcgccgccagccgcggataatattccgcctgctcggctaataccggctcctcaataaataatgggcgatatggctccagctctttaattaataccttagccatcggcgcgctaacgcggccgtgaaaatcgagaccaaactcaatttcattgccaaacgcttcgcggatttgcgccacggtattcaccgcggcatcaaccgcgcgggaattatcaatgatacccatctcttcgcagccgtttaatttaaaggtgtcaaaaccaatgccgcgcagcttcttaatcccgtcaatcacttcggcggggcggtcgccgcccacccagctgtaggctttaattttgtcgcgcaccagcccgcccatcagttgccacactggggcattcaggaccttacctttaatatcccatagcgcctgatcaataccggcgatggcgctcatcataatcgggccgccgcgataaaagccgccgcggtacattacctgccacaggtcattaatccgcgccggatcctgaccaatcaggtaatcgccaaattcatgaacggctgcctccaccgtacgggcgcgcccttcaatcaccggttcgccccagccgacgatgccttcatcggtttcaatcttcaggaacatccaacgcggaggtaaacggtacgtggtgatattggttattttcatttcactgcctctcgatacgcttttacgaatgcggctgcctgctgcgcggtacgttcaaccggctggccggcacgatagagatcgctacccaatcctgccccaacacagccggcattaatccactgcgccaggttttccggcgtcacgccgccaacggcaaagaccggaacctcgggcggaagcacggctttcaacgctttgatgtaatccgggccaaaagccgatgacgggaagattttcagagcctgcgcgccggcatcgagcgcgctaaaggcttcgctggcggtggcgcagcctggacacacggtcatgccgtaacccaccgctcgccggatcacttccggttgaatgtttggcgtcacaatcagccgacagcccatggccgccagcctgtcgacctgctccggttgcagcaccgtgcccgcgccgataagcgcctgctcgccgtaagcgtcgacgacctgcggaatacttttctcccactgcggcgagttcagcgggatttcgaccgcgtcgaaaccggcgtcgataacggcgccaacgtgagccagcgcctcgtctggcgtaataccgcgcaggatagcgataagtggaaggttagtttgccactgcataagcgatgctccttattcctgtctgaaatgccgtatcgcccgcaaccgcgctgacttcgcggccaatggcggcgaatgcctgctgatagcgggatgttaacgatgacccagcgacgagactgatcgcctgctgtccggcgaatgtgtcgctgagggtggcaacttcagcgccaatcagcaggccggaaagaaattcgctaacctgctcgcgaggcagcgcgcccagcacgtgcgaagcgcgaacttcaaacagctgcggcaggacggcggggttgttgataccgcgctgcagacctgccgcgaatgcggcagcggacgtttcctgcggcggtaagccggcgcccaccagcgagtgctgaagcaacagatgatgcaattcaccggtcaaaacggtacgaaaatcgtgaatttgccggcgatcggccagtacccacttgcagtgggttcccggcatcacgtagacagacgaaggggctaaggcgcgagcgcccagcagctgcgtttcttccccacgcatgacgttatggttatcgtcacgggaaacgcaaaggccgggaattatccagatattgtcgccaacggcagttaactgctggccaatatccgagaaagcggcaggaagcggcaaataaggggcgattttccagcccacgttgctgccgaccatccctgccatcaccaccggtgtggcgccatcgcgccagtgctgtgtgatttccgctaacaccgcagcgggagagcgaccattcaggcgcgttacgcctgcttcagattgcctgctttccaggcattcttcgccctgataaagccaggcgcgtaaattcgtcgatccccaatctattgcgatgtagcgagccgtcatgtgatttccttaagccttcgtgtcgagctggcgatcatcgtcaacgccgcctgctccgccgcgtcgctatcctgatgccgaatggcgtcaaatagcgctttatgttcctggagggttttcggcatgttgccttcatcgcccatccaggtccgttcaaataccgcccgctgcagcgaactgatcgccacgctaagctgctgcaaaaccgggttatgtactgactgcagcaccgcctcgtggtagcgaatatccgcttcgttaaaggcatcccggttttggttgttggcgatcatgtcattgagcgccgactcgatttccgccagatcgcttgaggtggcgcgttccgccgcccaacgggcaatggcgggttcaaccaggttgcgcacttcactcatcgcgctgataagacgcgggtcatagtcattttccagtacccactgcagcacctcggtgtcgaggtagttccactggtttctgggagcgacaaacgcgccgcgatagcgcttcatttcaatcagccgcttcgccatcagggaacgaaacacttcgcggatgatgttgcgcgaggtttcaaactcctcacagagttccgcttcggccggaagcgccgaacccgggacgtatttaccgctgacgatctgtttgcccagcgagatcacaatgcgatcggtcttattgagagtcatggagagtccttgtgctctatgtgtactgctctactttaccgtcgctgctgaatttcgcctcatgtttgtactactaacgtgatgctgtacgttatcaacatgagcgtaatgtagtacaacattattgtattgtactacaatttggatcacaaaaagaacaattcatgaaaattaaagcgcagcggccctggcaagaggcgataagagagaaaattaaggggaggaggcgttaaaacgcttcgccgacctggaagtaaaagccgctgctgcctttgccgataccgtagtcgaggcgaacattaacgcgaggtttgaattcaaagcggtagccaacgcccgccgaaggcagccagcggccattattcagcgacgacagtgagggccccatggttcccgccccggcccaggcgacaatcccgtgccgccaggtgagctgccggcgatattccagctgaccgctgacgacgtttttatcccggtagcgcccctggtagtagccgcgcatccgttcatcgctgccgagcagcggcatcatgctccacggtacctcgccctgggtgaaggcgccatcggcctcccaggcgagcacgcttttctcgctcagggcatgataatggctatagtgcagctgaaattcctcaaagcgggtatcgctacctaatccgggcgcatagtgggtatagcggaggttggcatactgaccccggcgcgggttagggacaaagtcgcgatcgtcccagttaatatcgatgctggcgccggagctgaataccgacggcccctgcggagtgttttctatcttcggccgatcgtcatggtccatctcatcggcattctgcgccgccagcgaccatcccgccccgagataaacatgatcgataagctgccgataaagggtgggtcgcagggtcagtacctgggcggtatacttctctttttcattgtctttatctccggcatgaaaaccctgcccccaataataagtgggcgtattggctatcgacccttcgacaaaaacgcgccacagatcacgatcgaaaaaggtgtagtttttcacgttgaggccaaaggcgccggtagagctggcgtagccgctgagcgtcagggtcgagttctggctggtggtatcctgcgggtcgggacgatacaggccgacgacagcggtgccaatgcccaaccctagttccggcgtatagaacggaccgggcatcacgccccagtcgatgcctttgctggcgtcgaacttatcgctggcgccgagatgctgcagccagccgtcgattttctcgcggctgagcgcctcggcctggctgcctgtcgggcaggccatcagcagcagaaaagtgataaacagtcggctcaaaagcgatactcgccggcaataaagaaactgttacgttcggcaaagccaaactcggtagtaatattaaaattctgcgtcagctcgtattgcgcgcccaccagaacgttccatggcgactgaagatgctgcttcacatcgaagcgaccgttattgtcctggttggccagattaaccatattctgcagcatcggcgacggcatcgagagatcgctgaggctgcctttaaactcctgctgcacatcctgatacatgctgccaacccacagatttagctttccggcggggagatgcagcgcatcgaccgatggcgtactgaaacgatagccaacgcgcggcgaaaaggtaagcgcatcgatgctgccgtcgaggatatcaaagcgcgtttgcgtgtagttggcgtccagcacggtaaaccaattgccgacgccgcccaccagggtggtgcccatcccgtaggtagtacctttaaaatcgagacgaaagtcgagatcctgcatccccggcaggggcaccactttaccgttcggtcccttcaggccgacagctatctgcgaaattgaatgcccttcggtgtgccccaccaggccataaacgttcataaacggcagcagccaggcatccagcttgagcgtctcggttttgctgctttcccgcgtatgaccaacgccaatctggaaagcgttatccagcgagaccggcccattagcgaaaatgttattcacggcgtgcttgcagacaggatccttaccgcaatcgatattgcggccatccagcgacagcccggtgaagtttatgctgtcgacattaatattctgccgcatatccatatagttaatgctgacgccaaacggcagcggcaggacgtagccgcgctttctggcctcatcgcctagcaaagggagtagcgaggacgatgctgccgccgcaggctggcgactttctggcgccggcagatccgcgggctctgcgccgtgataggcatacgccggttcgagcggcgccgttggttccgcggccgcgcaaatctgaacagaggcgaatggcagcgtaaccaacatcaaacggtggtatatattcatgaaaagtatgatgttagttctgagttgctaaaaagagggcgggtagcttatagaatcccctgcaaggattgagggatttaaatgcggattaacatctgttcatgaaaaaagagaagacagacccggcgaacgccgggccggaaagaagtttacgctaaaacgtatttttcaatggcgaaggcaacgccatcttcaaggttcgatttggtgatgaagttcgccgcttctttgaccgcaggaatggcgttatccattgccacgccgacgccggcaaattcaatcatcgcgatatcattttcctgatcgccaatcgccataatctcttccggcttgatgcccagcgcatcggccagcgacttcacgccagtgcctttattgacgcgtttatccagtatttcgaggaagtaaggcgcacttttcagcacggtgtacttctctttcacttccgccggaatacgggcgatggcctggtcgaggattgccggctcatcaatcatcatcactttcagcagctggatctcaggatccattttctccgcttcgcagaacaccagcggaatggttgccacataggattcgtggacggtgtagtagctgatatcgcggttcgcggtatacagcgtattgcgatccagcgcatggaagtgggagccgacctcgcgggagagctgctcaaggaagcgatagtcgtcatagctcagcgcggtttgcgcgacggtgcttccgtcaccagccttctgcaccagcgcgccattgtaggtaatgcagtaatcacccggctgctccatatgcagctctttcaaatagctgtggacgccagcgtaagggcgaccggtggtcagcaccacgttaacaccgcgctcgcgcgccgcggcgatggcggctttcaccgctggagagatggtatggtcgggcagcagcagcgtgccgtccatatcgattgcaatcagtttaatagccatagggtccccgggtaagatgagtctcccctcatgctaacgcgattccgctcaaaaaacagtaaaagtgtcggccagaaagggggatggaaccacagcagcggattcctcttttagcggcaaaagaaaagcccgatcgcgcgatgcgaccgggcttatacatcctgttgccccggtaaaactcgttaccgggaaacatgcggcttaaatatcgatattcgccgctttcagggcattctcttcgataaacgcgcgacgcggctcaacggcatcacccatcagggtggtgaacagctgatcggcagcgatggcatccttgacggtcacgcgcagcatgcgacggctgtccggatccatggtggtttcccacagctgatccgggttcatctcgcccagacctttatagcgctggatggagagaccgcgacgggactctttcaccagccagtccagggcctgctcgaagctggctaccggctgacgacgttcgccgcgctcgatgtaagcatcttcttccatcaggccgcgcagtttctcgcccagggcacaaatacgacgatattccggccccataatgaactcgttatccagcggatagtcggtatccacgccgtgggtacgtacgcgaataaccggctcaaaatgctgcagttctttgttctcgtggagatcgaatttccactggctgccgtgctgttctttctcgttcagctcggagaccagggtgttcacccagcgggtcaccttctgctcgtccgccaggtcggcctcggtcagggtcggctgatagataagctctttcagcagcgctttcgggaagcggcgctccatgcggccaatcattttctgggtggcattgaactcggcaaccagtttttccagcggttcgcccgccagcgccggcgcattggcgttggtgtgcagggtcgcaccgtcgagcgcgatggagatctgatactgatccatcgcttcgtcgtctttaatgtactgttcctgcttgcctttcttcactttgtacagcggcggctgggcaatgtagacgtggccgcgctcgacgatctccggcatctgacgatagaagaaggtcaacagcagggtacgaatgtgcgagccgtcgacgtccgcatcggtcatgatgatgatgctgtggtagcgcagtttatccggattgtactcatcgcgaccgataccgcagcccagcgcggtgatcagcgtcgccacttcctgggaagagagcattttatcgaagcgggctttctcaacgttaaggattttacccttcagcggtaggatcgcctggttcttgcggttacgaccctgtttagcagagccgcccgcggagtccccttccaccaggtacagttcggacagcgccgggtcgcgctcctggcaatccgccagtttgcccggcaggcctgccagatccagcgcgcctttacgacgagtcatctcacgagcgcgacgtgcggcctcacgggcgcgcgcggcgtcaataattttgccgaccacgattttcgcatcggatgggttttccagcaggtattcgctcagcagttcgttcatctgctgctccaccgccgatttcacctcggaggagaccagcttgtctttggtctgcgaggagaatttcggatccggcaccttcacggataccacggcaatcaggccttcacgcgcatcgtcgccggtggcgctgactttcgcttttttgctatagccctctttgtccatataggcgttaagagtacgggtcatcgccgcgcggaagccggcgaggtgagtaccgccgtcacgctgcggaatgttgttggtaaagcagtagatgttttcctggaagccgtcgttccactgcagggccacttccacgccgataccgtctttttcggtggagaaatagaaaatattcgggtggatcggcgttttgttcttgttgagatactcaacgaacgccttgatgccgccttcgtagtggaaatggtcttctttgccgtcgcgcttatcgcgcaggcggatagagacgccggagttcaggaacgacagctcgcgcaggcgtttcgccaggatgtcatattcaaattcggtgacattggtgaaggtttccaggcttggccagaaacgcaccatggtgccggttttgtcggtttcgccagtcacggccagcggtgcctgcggcacaccgtgttcgtacatctgcttgtgaactttgttatcgcgctggataaccagctccagcttctgcgacagggcgttaaccaccgagacgcctacgccgtgcagaccgccggaaactttataggagttatcatcgaatttaccgccagcgtgcaggacggtcatgataacttccgctgcggagacgccctcttccgggtgaatgccggtcgggatgccgcggccgtcatcctggacggagacggagttatcgctgtggatggtgacaacgatatctttgcagtaacccgcgagcgcttcgtcgatagcgttatccacaacctcgaataccatgtggtgcagaccggtgccgtcatccgtgtcgccgatatacatacccgggcgcttacgcaccgcatccagccctttcaggactttgatactggaggagtcataagaattcgacatcaacgtttctcgctcatttaatcttgggttaatccgttattttacctttttccacgcggaacatcttcgaatttttgtccgacatgtccataacgtgttcagcgctgatcgcgctgacgaaaacctgcgactgcgtcgctttcaggcggctggataacagaccgcggcgggcatcatcaagttccgaggcaaaatcatctatcaggtacaggcagcgccgcccgctgacgcgggtgaggaactctccttgcgccagacgcagggcgcacatcagcagcttaagctgcccgcgcgacaaggtatcttccaccggcgccccgtcggcgcgaatgcgaaaatccgctttatgcgggccgtgggcggtgtaggttaacattctgtcgcgctcgaaattccgctccaacacctccgcgtagtcggtctctttttcccagccgcgctggaaagagaaggtgagcgtgaattccggtaaaaattgctgacaggtatccgccatgtcttcgacgatagcggcgctgtattcggcacgccagcggctgatctgctccgccagcgggattaattccagatcccaaggccgcagctgggcatagcggctgacctgacgcagcgcggcgttgcgctgcttgaccaggcgcttcagattgctccaggcggtgaagaatccggcttcgttatgaaagcatccccagtcaaggaatgctcttctgtatttggggccgccgttgagtaaagtaaacccctccggcgtaatcagctgcatcggcatcaggtgcgccagctccgccactttgtggccgtcggtgccgtcgatacgcaccttgctgtcgccctgtttgtctttggtcaggccgatggcggtttcccgctcttcgccctgcagacggccatgcagaacaaacgcatcctgctcgtggcggatcacccggccaatttgcaaactgcgaaatgcccggccgtggccaagcgtatagatagcttccagcacgctggttttgccgctgccgttcgcgccaaccaggaagttaaagccgggagataaagcgagatccgcatgttcaatattgcggaagtctttgatgagcaagcgcgtcagtgacatatcagcgttctttgggccagggcgttatcggcgcagccagtttcaacgcggactgcgcgcagaccctggagcgtacacaaagtacgtgacaggggcgagcacagcccaggttgaaaatggcaagtaagatagcccgatattttccactacaatctcataggcatgacgacataggctgcggattgagaggccgcatcctcaatctgcacgctcgacaccgaatccgtcagcagaatgcgtacattctcgcacttcagcgcattcagcacatccagcacatagctaacgttgaagccaatctccatctccgttccggcgtaggtcacatccaaaatctcttccgcttcttcctgttccgggttattggcggtgattttcagctggttttcgctaacgtacagccgcacgccgcggaatttttcgttggagagaatcgccgcgcgcgcaaaagcctgcttcagaatatcgcagcccgcttcgaggtgtttatccggatttttcggcaatacgcggcgataatccgggaaacggccatcaaccagcttagaggtgaagataaaatcgccaacgtgggcgcggatattgttgctgccaatctgcacgcgcagcggggtatcgccgccgtcgagcatccgcatcagctcaatcacccctttacgcggcacgatcaccgaatggttcggcagcgacgcttccagaggcatcgaacagaccgccaggcggtgaccatcggtggccaccgtgcgcagttcgctgccttcggtttcaaacagcatgccgtttaagtagtaacgaacatcctggtgcgccatcgagaactgggtggcttcgatcagacgcttcatggtcgcctgcggcagggtaaactccacttcactctgccagtcatccagattcgggaaatcggcggcgggcagggtcgacagcgagaagcggctgcggccggaacgcaccagcatgcgatcgccttccaactgaaccgcgatctccgcgccttccggcaggccgcggcagatatcaaagaatttccgtgccggaacggtcgttgcgcccgcttcgtgcggctgaaccagcgccacgcgcgccaccatctccatttcaagatcggtaccggtcagcgacagcgcgccgtccgcgacctgaagcagcaggttaccgagaatgggcagcgtcggacgaccacctaacggaccgctcacctgttgcagcggttttaataaatgttcacgttctacggtaaatttcatagcgtcacgaggataatgttctgattaaattggaaaaatcttctttaatgtcgtggctttcttcacgcagctgctcaatcttgcggcaggcgtgcagcacggtggtatggtctcggccgccaaacgcatcgccgatttccggcaggctgtggttggtcagctctttggccagcgccatcgccatctggcgaggacgcgccaccgaacgggagcggcgtttggacagcaggtccgctaccttaatcttgtagtactccgccaccgtcttttgaatattgtcgatggtgaccagtttttcctgcagcgccagcagatcgcgcagcgcttcgcgcacgaaatcgatggtgatcgcccggccggtgaagttggcgttggcgataacgcggttcagcgccccctccagctcacgcacgttcgagcgcagacgcttggcaataaagaacgccacttcgcccggcaggcggatgtcgttctcgtcggcttttttcatcaggatcgcgacgcgggtttccagctccggcggctcgatcgccaccgtcagcccccagccgaagcgggattttagacgatcctcaacgccgttgatctcttttggataacgatccgacgtcaggatgatctgctgattaccttccagaagcgcattgaaggtgtggaaaaactcttcctgggatcgttctttattggcaaagaactgaatgtcatcgatcagcagggcgtcaacggagcggtagtaacgcttaaactcttcgatggcgttgttctgcagcgctttaaccatgtcctgaacgaaacgctcggagtgcatatagaccactttcgcgttcggcttacgcgccacaatgccgttccccaccgcgtgcagcaggtgagttttacccagacccgtcccgccatagaggaacagggggttgtaggcgccgcccgggttatccgccacctgacgcgccgccgcgcgggccagctggttagatttaccttcgacgaagttatcaaacgtgtgtttcacgttaacgttagagcggtaggtcggctccgccggcgccgggacattatcccagccagggcgcacgatcgtcggcgccgcgcgcgcggtctgcacctgcgccgccggaatggccgccgcagccgggcttaccgcccctttctgcagcgagctggcgggcttagcgcccacctcaaaacgcagctgcggggcgtccgcaccgcaaaaatcattgaggagtccattgatattattgaggtatttgtcccttacccagtcgagcacaaaacggtttggcgcatacagtgccagcgtgttatcgctcagttccgcctgcaatgggcggatccacatgctgaattctgtggctggtaactcatcctgcaatcgggcaagacactgctgccaaagcgaaagtgacacggcggactccactcgaacataaaatcgatatcaaagaaaaactgaaacaatcgtgattgttggcacacgtcgacaagaccctgcattagccgaaaagcccctgcacaaaaggggtgacgtgcgaaccgctatctgcggttattacccgctgcggatccggggatcgcgatcgggaccggggatcatagcctaaactgagaaagagatcttgtgtttctcaacagattcttcccgatttatccacaggaaggatcgaaaccgggtaagtgtaatcgatcctgcggggagtgaagcacgatttccgccgcatattggaaaaattaatgagctatgccgcttttgggcggaaacgatctaataaagatccttgcggatccttgcgctttactggccaggccgtataatcccccacccggcgcgtaatgcccgttttcgtcacgcgtctcagcttattttttgtgcgacgaggtgcgagaaataaggaaagagaattgactccggagtgtacaattattacaatccggcctctttaatcacccacgctgaggcgtaagtcgttcgaagttcgttcgggtctacgcaaaagtcagtgaatttattcaagtttaggtagaaatcgccatgaaacgcacttttcaaccgtctgtactgaagcgcaaccgttctcacggcttccgtgctcgtatggctactaaaaatggtcgtcaggttctggcacgtcgtcgtgctaaaggccgcgctcgtctgaccgtttccaagtaataaagctaaccctgcgtggttaagctcgcatttcccagggagttacgcttgttaactcccagtcatttcactttcgtcttccagcagccacaacgggctggcacgccgcaaatcaccatcctcggccgcctgaattcgctggggcatccccgcatcggtctcaccgtcgccaagaaaaacgtgaaacgcgcacatgaacgcaatcggattaaacgtctgacgcgtgaaagttttcgtttgcgtcaacatgaactcccgccaatggatttcgtggtggtggcgaaaagaggggttgccgacctcgataaccgtgctctctcggaagcgttggaaaaattatggcgccgccattgtcgcctggctcgcgggtcctgatcggcctgattcgagtttatcagcgcctgattagtccgctactcgggccgcattgtcgtttcaccccaacctgttctcaatacggaattgaggccttacgcaggtttggagtgataaaaggcagttggttgacgatgaaacgcgtattaaaatgccaccctttacaccctggtggtgacgatcccgtcccgcctggaccatttgataccagagaacactaacgatggattcgcaacgcaatcttcttatcatcgctttgttgttcgtgtctttcatgatctggcaagcctgggagcaggacaaaaatccgcagccccagcagcagaccacgcagactacgaccacagcagcgggtagcgccgccgaccagggcgtaccggccagtggccaggggaaactgattacggttaaaaccgacgtgcttgagctgactatcaacaccaacggtggcgatattgagcaggcgctgcttctggcgtatccaaaaacgctgaaatcgaccgaaccgttccagttactggaaaccacgccgcagtttgtctaccaggcgcagagcggcttaaccggccgtgacggcccggataacccggcaaacggcccgcgtccgctgtacaacgtcgataaagaggcgtttgtgctggccgatggccaggatgagctcgttatcccgctgacctacactgacaaagccggcaacgtcttcaccaaaaccttcaccctgaagcgcggtggctatgcggtgaacgtgggttacagcgtgcagaatgccagcgagaagcctctggaagtctcaaccttcggtcagctgaagcagaccgctgcgctgccgaccagtcgcgatacgcagaccggtggcctgtccacgatgcatactttccgtggcgccgcgttctccactgcggattcgaaatacgagaaatataaattcgataccattctggataacgaaaacctgaacgtcagcaccaaaaacggttgggttgccatgctgcagcagtacttcaccaccgcatgggtgccgcggaataacgggacgaataacttctacaccgccaacctcggcaacggcgttgtcgctattggctacaaatcgcagccggtactggtgcagccaggccagaccgacaaactgcagagcacgctgtgggtcggcccggctattcaggacaaaatggctgccgttgcgccgcatctggatctgaccgtcgactacggctggctgtggttcatctcccaaccgctgttcaagctgctgaaattcatccacagcttcctcggcaactggggcttctcgatcatcgttatcacctttatcgttcgtggcatcatgtacccgctgaccaaagcgcagtacacctccatggcgaagatgcgcatgctgcagccgaagattcaggccatgcgtgagcgtctgggcgacgataaacaacgtcaaagccaggagatgatggcgctgtataaagcggaaaaagtaaaccctctgggcggctgcttcccgctgattattcagatgccgatcttccttgcgctgtattacatgctgagcgcctcggttgaactgcgtcatgcgccgtttatcctgtggatccacgacctgtctgctcaggacccgtactacatcctgccgatcatcatgggcgcgaccatgttcttcatccagaagatgtcgccgaccaccgtgaccgacccgatgcagcagaagatcatgacctttatgccggtcatcttcacggtgttcttcctgtggttcccgtctggcctggtggtgtactacatcgtcagcaacctggtcaccattattcagcagcagctgatttaccgtggtctggagaaacgtggcctgcatagccgcgagaagaagaaatcctgatactcttcattcttcaagccaacgcatctgcgacttggataatttagagtagttacggtaacgttaatgccagagaaggcggtcaatggaccgccttttttacatctacatagagagtcaccatgagccataacgacactatcgtcgcccaggcaacccctccgggacgcgggggtgtgggcatcctgcgtatctccggtcttaaggcgcgcgacgtcgcgcaggcggtgctgggcaagctgccgaagccgcgctatgccgactacctgccgttcaacgacgttgacggtaccccgctggatcaggggattgcgctgtggttccccgggccgaactcctttaccggggaagatgtgcttgagctgcagggccacggcggcccggtcattctcgacctgctgcttaaacgtattctgaccctgccgggcctgcgcatcgccaggccgggtgagttttccgagcgcgcgttcctcaacgacaagctcgatctggcgcaggcagaggccatcgccgaccttatcgacgccagttcagagcaggcggcgcgctcggcgctgaattcgctgcagggggcgttctccgcgcgggtgaatcatcttgtggaagcgctcactcacctgcgcatctacgtggaagcggccattgacttcccggatgaagaaatcgatttcctttccgacggcaaaattgaagcccagctgaacgaggtgatggccgatctcgacgccgtccgcgcggaagctcgtcagggcagcctgctgcgcgaagggatgaaagtggtgatcgccgggcggccaaatgccggtaaatcaagcctgctgaacgccctggcgggccgcgaagcggcgatcgtcaccgatatcgccggtaccacccgcgacgtgctacgcgagcatatccatatcgacggcatgccgctgcatatcatcgataccgcaggcctgcgcgatgctaatgacgaagtggaacgtatcggcatcgagcgcgcctggcaggagattgcccaggccgatcgggtgctgtttatggtcgatggcaccaccaccggcgccgttgacccggcggagatctggccagactttatcgagcgcctgcccgctaaactgccgattaccgtggtgcgcaataaagccgatgtcaccggcgaagcgctgggtatcagtgaagtaaatggccactcacttattcgcctgtcggcacgtaccggcgaaggcgtggaggtgctacgtaaccacctcaagcagagcatgggcttcgataccaatatggaaggcggcttcctcgcccgccgccgtcacctgcaggccctggaagaggcggcgaaccatctgcagcagggcaaagcccagctgctgggcgcctgggccggcgagctgctggcggaagagctgcgcctcgcgcagcaggcgctgagcgagatcaccggggagttcacttccgacgatctgctgggccgcatcttctccagcttctgtatcggtaagtaaccgtcagtccgtaaacgttcactaacccgtattaacgccgcgttaatgcgggttttttcttgccctttgcaacgcaacgttctctacttttatctcccctctgccgcgagactaaaacatgaccgttgaatataccgtgatcgagaaggtgccctccgccgaagcgttttgccacctgcgggtagccgccggcatgtcgccgcgccccctggaaggcgccagagccggactgccgcatagctgttatggcgtacatatcctctggcaggagacgccgatcgcgatgggacgcatcgtcggcgacggcgcgattaatttcgatattgtcgacgtcgccgtcgatccggctcaccagggaaaaggccttggccggctggtgatggagaagctggtcgcctggctggacgctaacgcctttgatggcgcctacgttacgctggtggcggatgtgccggaactgtacgcgaagttcggcttcgaaagcgttcgcccggagagcgaggggatggcccgcgtctggcgaacccgcagtcgttagctcgcatttcctgccaggaaaagagcgttgtccaaatggcaactcgtcttacggcgcgttcctcactatgctgaacgccattcacatcgcgaggatcccatgacacgctttcttctctgcagctttgccctggttctgctctacccctccggcatcgatatgtatctggtcggcctgccgcgtattgctcaggacctgggggccagcgaggcgcaattacatatcgccttctcggtctatctggccggtatggcctccgcgatgctgtttgctggccgcatcgccgaccgctcggggcgtaagcctgtcgctattgtaggtgcagcgatctttgttatcgcctccctgctctgcgcccaggcgcataccagcagccacttcctcatcggacgctttatccaggggatcggcgccggcagctgctacgtggtggctttcgctatcctgcgcgatacgctggacgaccgtcgccgcgccaaggtgctgtcgttgctcaacggcatcacctgcattatccccgtcctggcgccggtgcttggccacctgattatgctgaaatatccgtggcagagcctgttctacacgatgaccggcatgggcgtcatgatcgctgtgctgtcggtctttatcctgcgtgaaacgcggccgacggcgcctccgcaggcagcgtcaccgcagcatgacgctggcgaatcgctgttgaaccgctttttcctcagccgcttactcattaccaccctcagcgtgacggtgatcctgacctacgttaacgtctcgccggtactaatgatggaagagatggggttcgaccggggaacttactcaatggcgatggctctgatggcgatgatcagcatggcggtctccttctcaacgccgttcgccctgtcgctgtttaatccccgcaccttaatgctgacctcacaggtgctgtttctggcggcaggcgtgacgctgagcctcgccactcgccaggccgtcaccctgatcgggctgggcatgatttgcgccggcttctccgttgggttcggcgtcgcgatgagccaggcgctggggccgttcacgctgcgcgcgggcgtcgccagctcggtcctcggcatcgcgcaggtgtgcggttcatcgctgtggatttggctcgccgccatcatcggactcagcgcaatgaatatgctgatcgggatactcattgcctgtagcatagtgagccttgttttgttactggtcgtcaccccgccgcgggttgcgcaatacgatgaagaagccgctgtcgagtcttgatcttaatttactcctctgcctgcagctcctgacccaggagctcagcgttacccgtacggcgaagcggatgaacgtttcgccgtcagcggtgagcaagtcgctggccaaactgcgcgcctggtttgacgatccgctgtttgtgaaaaccccgctgggcctggcgcccacgccgctggtcagcagcatggagcaggatctggcggactggatgcagatgggcaaccaaatcctcgataaaccgcaccataccatgcccagcggcctcaaattcgaactggcggcggaagcgccgctgctgatgatcctgtttaacaccctctctcagcgcatctatcagcgctatccgcaggcattgattcgtttgcgcaactgggactacgactccctggacgccatcatccgcggtgaggtggatatcggcttctgcggacgcgaaagccatccgcagtcgcgtgagctgctgagcctgctgccgtggtatatcgattttgatgtgctgttcaccgacctgccgcaggtctggctgcgcgccgatcatccggcgctcagggaagagtgggatctggcggcattcttacgctatccgcatatcactatctgctgggaacaacgcgatacctgggccctggacgacgtgctgcaggagctggggtataagcgtaacgtggcgctgaccgtgccggggtttgagcaatcactttttatggccgctcagccgcagcacaccatgctggccaccgcgccgcgctactgtcagcactataatcagcagcaccagctgccgctcgtctcccggccgctccccctggaggcgcagcatctggaaaagctgcgcgttcccttcaccctgctatggcataagcgcaacagctacaacccgaagcttgtctggcttagagatacgctgaaagcgctctattccggtacgctttaagccttgtttcgtgcccatagcaccttatttgcgcaagaatttgtaaaattcaaacaaattcccttttcaatgggggatttcggcattaaaacctgttaataccaggcgataatagcgcccgcagttttatccagaccattactcacggagcgacgtatggcaacgcattttgcaagagggatactcagtaccggggagccgctatcgacacgtttgtcagcggcctgtcatcaatccgcacgtcttctcccgacatatcgccaggctcgcttttgcgcgtcgcgctcgctgcttgccgagctgctgtttatgctttacggcatcagcgagctgcctgaaatcatcaacgaagccaatggccgaccggtttttagcgatcgccaactcccccgcttttcgatcgcttatactggcaatatcgttggtgttgccctcaccaccgagggggattgtggcctcgacatggaactgcagcgcactgtccgcagccacgacgccgaccggcacaatttcagtaacaatgagaatctgtggattaacatacagcatgatccggacgaagcgcgcagccagctggtagcgctgcgccgcagcgtgctaaagctgaccggcgaagcatcaacgcagctgcagctgctgcccggctctggccgcctgcgcaccgccggcagtcagccaatcgaagcggtatgtgacgccgaatcgctgctggtatggtccattgccgcaaccccgaacatcggctcgctgaaggtctgggaatatgatgctaagggaggtgactggcgcagcctggcggatgcgcagcagcgcgcacgcgaaccgtcagcccgcctgatgcgctttaccagcttacccatggaaaaaaccttatccctcaattgaccggtcttgccggcatcatgatccaaaggagcaatcatgtcagataccttgaaagtggttacgttactcggcagcctgcgtaaagggtcgtttaatggaatggtcgcgcgcaccctgcccggcatcgcgccagcgggcatggatatctccgcgctgccgtcgatcggtgatatcccgctgtacgatgctgatatgcaggaggaagaaggttttccgcagcgcgtgcaggagattgcgcaacagatccgcgaggcggatggggtagtgatagtcactccagaatataactattccgtgcctggcggcctgaaaaacgccatcgactggctgtcacgcctgcccgagcagccgctgtccggcaaaccggtactgatccagaccagctccatgggcgctatcggcggggctcgctgccagtatcatctgcgccagattctggtcttcctcgatgcgatggtcatgaacaagccggagtttatgggcggcgtcatccagaacaaagtcgatccgcaggcgggtgaagtggtcgatcagagcacgctggaccatctgcgcggccagctgaccgcctttggcgactatattcggcgggttaaagcataaaaaaagcccggcagcgatgccgggctttttcatcatgcgtgcggattaatgtgcatcgataaagacaattttcagcacgaacagcagcgaaacgataatcacacacgggctgagctcgcgcagccggccggtaccgatcttcatcacgcagtaagagataaagcccagggcgataccttcggtgatcgagaagctaaacggcatcatcactgcggtgatgaacgcaggcaccgcctcggtcaggtcgctccacttcacgcgcgcgaggctggaggtcatcagcacgccgacgtatatcagcgcgcccgcggcggcatagccaggaaccatccccgccagcggagagaggaaaataaccagcaggaacaggataccaacgacaacggcggtcaggccggtacgcccgcccacggaaacgccggaagaagattcgatataggccgtcaccgacgaggtaccgatgaaggagcccgccaccgacgagacgctatcgacaaacagcgcttgcttcatgcgcgggaatttaccgttggcatccgcgagacccgctttatccgtcacgccaatcagcgtcccggaggagtcaaacaggttgaccagcataaaggagaagatcacgccggccaggcccaggttcagggagcccgccagatcgacctgaccaatcaccgaagccacgctcggcggcgccgagacgatcccggtgtaatgcacgtcgcccagcatccagcccagcagggtggtcacaacgatagagaccagtaccgcggcgtgaatgttgcgcgacgccagaatcgcgatgataaagaagcccagcacgcccagcagtacgctgtgggaagtcaaatgaccaatgctgaccagcgtttccggattggcgacaatcaccccggcgtttttcaggcccatcatgccgataaacaggccgataccgctggtgatacctacacgcaggctaagcggaatattggcgatcatccagtaacgtacgcggaagatggtcagcagcagcaggcccacggcgccccagaagatggcgcccatgcccacctgccacggcagccccatcgcctgcaccaccacaaaggcgaaaaaggcgttcaggcccatcgccggcgccagggcgaccggcaggttcgcgaacagacccatcaggatactgccgaaagcggcaatcagacaggtggtcacaaacacggcgctggtatccatgcccgctacgccaagaatttgtgggttaacaaaaacgatatacaccatcgtcaggaacgtggtgaaaccggcgatggcttcggtgcgcaccgtggtgccgtgctcgcgcagcttaaatacgcgctccagcagaccctggccagaagactggctggtttgttgttgactcattatcggtttccgaacgtaaggagggaaaattcgaggctatcctataccaaattacggcaccaggcgcggttgtatggtaatttttttcatttattttgcttatacggcaacgattgcgtcgcggcattgagcattacgaaaacgttaaacttgttaatatggaaaggctatgactcaaccagaagcagtattttttgactgtgacggcacgctggtcgacagcgaggtgatttgctcccgcgcctacgttcacatgtttcaggaattcggcattacgctggacctcgccgagatttttaagcgcttcaaaggtgtgaagctgtacgaaattatcgacaccatcaacgctgagtatggcgttaatctgcaaaaggccaccctggagccgatttaccgggcggaggtcgctcgcctgttcgatagcgagctggaggtgattcccggagcccaggcgctgctggatgcggtaagcgtcccgatgtgcgtggtttccaatggcccagtcagtaagatgcagcactcgctcggacgcaccggcctgctgcgccatttcactgaccgcttgtacagcggctacgatattcagcgctggaagcccgacccggcgctgatgtttcatgcggcagaggccatgcaggtaaaagccgaaaactgtattctggtggatgactccagcgccggcgctcagtcggggattgccgccggcatggaagtgttttatttctgcgccgatccgcacaaccagccgatcgatcatcccaaagtgacgacctttaccgatctggcagagctgccggcattgtggcaggcgcgcggctgggatatcacgcgttaagggcctggtgagcggcacgttggcatcgatgaacccccgctatgcgtctgcgtaagcggggaatagaactagcggctttttattgctgcaactccgccgccgccgctttatcggcaataatcaccagtgaagggtgcaatttgagcactgaagccggcacctgcacgctgaccggaccttccaccacttgctttaacgcgtgcgcttttgccgcaccgctgacaattagcaataaatttttcgccgccatcacgcttctcggccccatggtgacatagctgtctggtactgccgagatatccccgcccatctcgctgttagcgataagagcaatcatttccccatgaatcggcacttcgaccgtctgatcatgaaagcgggtggtattcggcaggttgccgcaaaaatggccgtcggcccccagccccagcaccatcagatccagaccgccagcctcttccagctggcgatcgtgctgagcggcgttgtccagcgtcagcttgtgaatgttctcttctttgatctgcgccggggtaaaaaacagctggcgcaaattagatatcgtgacgccttctcgcgactggccgcgaaaagggatctcatcgaagttgtaatagtgcacccgatcatagaatgctttgcctttcacggcggcggtcaaatgctcatacatccgctttggcgtgctccccgccgtcaccgccagattcacccgccgcggcgccgtgatatagcccagaacatgatggctggcgaccaggctcatctcttcataatcttcggtcacaatcattttcatcttgtcgtccttcacaagcacaaaacgggggctgaaggccccctaaaggttatttaaacagtttttgcacaaactcggcgtaggccgggcgccagacgtccatttcatggttcaggccgggatactggtggtaatcaaatttaatctgctgtttttccagctcgcttttcagaccagcaatgtctttaccggtcacagaatctttttccccgacgaccacggtaaagttacgcagctgcttattgatcgcgtcaggctgcttcagctgcgcttccacgccggcattcggcaccgtggtagtcgtaacgccgctaaaggtggcgagccagccaaagctctccagatgattcattccggaaaccagcgcctgataaccgccctgcgagaggcccgccagcgcccgaccgtcggcatctttacgcacgttaaatcgggcatcgatcagcggaataatatcctgcatgagctctttatccgccgcctgcgcattaagtggatagaaggttttgcgccgctcctgcggcgggaagttttccgcgaccgcttccgggatatcggtttcggtatccgggaccaccactagcatcggcttaatcttgccctccgccagcaggttatccatgatttgcgggatccgcccctgatcgatggccgacaggccgctgtcgccaaagccatgatagaaatagagcaccggcagcggatcgccggttccgctatagcccggcggcgtccagacatagagacgacgttcggcgttcagagccttcgagtgataggtgagggtgcgcagatcgccatgcgcaacctcccgatcgtcaagaatactgcccggcaccagaatcaaactggtgttcacctggcgctgcggcttctgatagcggctgccggtatctaccgagcggaagccatccacatcgaaatagtattcatagagattgggcttcatcggctcgcttttccatgtccagactccgtccgctgctttggtcatgtcgtgcgagacaaaggagtccggcgtggcgccagtcactatcgagacccgccgggcatcaggggcaaacaagcggtaagtgatactcttatccgcgttaacctgggtgataaagtggctcaccggcaggcttgggtccgacatcgcgggtaatggcgccgcctggagggtaaacgccgcgccctccagcgccagggcgaaataaattgcatgtcgtttcatcgttgttcctctttcgttgtgtccgttcagttatcgtcttaccaccagatttccgcctgcgcccccacggcaaactgatcgttcttcccgtcttcaaaaatgctggtggtattattcgcggccttatccaggtcaatatccttcgctttaatataggtggcatagaaacgaatttccgggcgcgaggtcagcatactggtattgactttgaaggtatggaacagcgtggtcttgtagccggactcgttatatttcttgccggtaacatctttgttttgctgtttgaagtaccccagctcgacgccggtctggttatatttatcccagatataagccggtcgcagaaccgtacggatagattcaaaatcggagtgggctccggtttcgtagctatagacgtcgttaccaaaagagtagacgatggcattcgccataataacgtcatcgcgtaaataggtttccccctgcgtggttaagcgcacggcggtgccattggtatgatcgccataatagcggccattaaaggtggtataggggctggatccggcatagcgtgagaagctgctggcaatagagttattggccagtaagaaagagaattcgttaaagccgccgttagcaaatttctgcgttaacgaggtaccagccatccaggtatctttccacggataataaccttcattgccctctttatatttctcagaggaactttggttggcggcgacatagcgtccgctaaccatcaggctggctttatcccacagcggaatctctttgtaacgaacgtccagggtgttggtgttaatttgctgcttattgcttaaagaacggtcataatcatcgacatcttcgcgaatcaacgcgatatcgaatttcccggcgcccacctgccagttttccagccctacgccggccgccgcatcggttctctgcgttttccagtccagcatctggatttcaatttttggcgccccgtgtttgccgacccagaaatcggcttccggcgcaaacggcaggaaccctttggtgttaacatacatatccgagaattgaatgtagttttcgccgccggcattgtcaccaaaccagccagtggaatactgctggccgacgttcccgtcgagcatcacgatggcgtcgacgcgtttatcgccttcctgaaacacccgctgcttcagctgcagatcgaaccagccggaatattcattgcccaggcggccaagcgaaccgatcgcccatgattttggcgagccgtgcgaggcggtcccccagccggaacggaagtagccgttatagctaaagccaatttcatctttcacgaacttgctaaagtctttcagcgtcatcgcgctgtaggctggcgcgccatcggtgacaggttgttgatttttaaccagcaccgcatccggtttaaccgccgttttcggcccggcggtcgccccccggtcttgcgcttctgaccttccgcaggaggagaccatgaggcccaaatctggtctctttttctttcctggtcctgatattttttgagctctttttgcgtgtctttgagcgctttttccagcagctcaagccgttgttccaccgtcaactggctcgctagcagattagttgaataacaaagtggcgccagcaagactatcgccgaagcgatcctgttttttctcatcataatattcccttatataatcattggcgtaaataaaacacgacaacaaccctattccgtgccggtgctaatagccgtatccataccgtttgacgtcgcggcggctgttatttttgcggttagacaaaaacaaaaaaacctgaagaagaccatctgccttggcagataatcctcttcaggttttgcccgcgcatcgcggtagcaaccctcattcagccattattggcccgcataaaacaaaaaacctgatatcgcccccaggagcaatatcaggttttgcctgctgtcgcagtcacaatccgtttaaaccatcctgagcgttaaaactcagtgagtggcagctgattgttacgcgataaaatgaataactcaaacgggcagattgttaattgtgacgataatctcagcaatctcgctgccgcggggtaaaacatatctaattctgataaatccatttaccagaattagacagaatgattattactctttcggatctttgccagcgagcagtttatccagctcatcgccgccaacgtgacggaaatcctgacctttgacgaagtagaaaatatattcgcagatattctggcagcggtcgccgatacgctcgatggagcgcgcgcagaacagcgcggtcaggacgctggggatagtgcgcgagtcttccatcatgtaggtcatcagctgacgcacgatgccttcatactcctggtcgactttcttatcttcgcgatagatacgtaccgcttcgtcgagatccatacgcgcaaacgcatccagtacgtcatgcagcatctgcaccgtgtggcggcccagcgattcgaggctcaccagcagcggctggtgctgctgggaaaacttctccagcgcggtgcggcagattttatccgccacgtcgccaatgcgttccagctcagcgatagtcttgatgatcgccatcaccaggcgcaggtcgctggcggtcggctggcgcttggcgatgatgcgcacgcacgcttcatcgatagccacttccatcatgttgacctgcttgtcgccgtcgatgacgcgtttcgccagatcgctgtcctggttatgcatggcggtgatggcatcagagagctgctgttccaccagcccacccatggtcatcacctgggtgcggatatactccagttcagcgttgaactggccggaaatatgtttgttaagatttaggttgtccatggtgtctcctgattgcccaactggtgagagcctgaaagcacaagggcaaatcaaccgtagcggccagtaatataatcttcagtttgtttcttcgcgggcttagtgaacaggtcatccgtgttgctgaactcaatcagctcgccaagatacataaatgccgtatggtcggagcaacgcgcagcctgctgcatgttgtgagtcacgataacgacggtgtagtcctgtttcagctcggtgatcagctcttcgatacgcccggtggagatcgggtccagcgcggagcacggctcatcaagcagcagcacttccgggcggatcgcgataccgcgggcaatgcacagacgctgctgctgaccaccggagagagaatacccgctctggtgcagtttatctttggtttcgttccataatgcggctttggtcagcgcccactgcacgcgctcgtccatatcggcacgggacagcttttcaaacaggcgcacgccgaaggcgatattgtcgtatatggacatcgggaacggcgttggtttctggaacaccatgccaaccttagcgcgcagcagggcgatatcctgggtgttagtcagaatgttgtcgccatccagcaggatctcaccttccgcgcgctgctccggatatagttcaaacatcttgttgaacgtgcgcagcagggtggatttaccacagcctgacggaccgataaacgccgtcacctggtttttggtgatatccaggttgatgttcttcagggcatggaatttgccgtagtagaagttcaggttacgaactgaaatcttacccggagctgtattcaccatactcatctcaatctcttcctcattcagcgcagcagttgctgcgccgcaaaaaattaaccgtgtttcttcttggcgaagataacgcgcgccaggatgttcagcagcaagacgcacagggtgataatcaacaccccggcccatgccagttgctgccactccgcaaacggactcatggcaaatttgaaaatggtcaccggcaggttagcaatcggctgcatcatgtcggtgctccagaactggttggacagcgcggtgaacagcagcggcgccgtttccccggcgatacgggcaatagccagcaggatcccggtcataatccctgagacggaggctttcagggtgatcgccgagatcatcttccacttcggcgtccccagcgcataggccgcttcacgcaggctatccggcaccagcttcagcatgttttcggtggtacgaataacgataggcacctgcagcagcgccagcgcgataacgcccgcccagcccgagaagtgctgcatctgcgccaccacaatggtgtagacgaacagacccaccacgatagacggcgcggaaagcagaatgtcgttgataaagcggatgatttccgccagcaccgacttgcggccatactccgccagataaattccggcgaggatacccagcggcgtaccaaatacggttgcccacaggatcagcaggccgctgccggcgagggcgttagccagtccaccgcccgccgtattcggcggcggcgtcatttcggtgaacagcgccagactcatgccgtcgaaaccgcgggttatcgtcgccatcaggatccagataagccagaacaaaccaaacgccatggtcgccatcgacagcgctagagcgatacggttcttcatgcggcgtttggcctgcatcttgcgacgggactccgccagttcggcggtagtttgcaattcaatggtcgccattagcgtgccccctcattcttcgcgaggcgcataatcataaacttcgacgcggccagaacgataaaggtgataacgaacaggatcaggcccagctccatcagcgccgccacgtgcaggccggtttccgcttcggcgaactcattagccagcgcggaggtaatactgttccccggcatatacaacgagatgctgtcgagctggtaggtgttgccgatgataaaggtgaccgccatggtttcacccagcgcgcggcccagaccgagcatcaccccgccgatcaccccgtttttagtgaacggtaaaacaatgcgccagataacttcccaggtggtgcagccgatgccataggccgactctttcatcatcaccggggtctgttcgaaaacatcgcgcatgaccgcggcgatgtaagggatgatcatgatggccagaatgacgccagcggcaagaataccgataccaaacgccgggccggcaaacagcgcgccgacgaacgggatggtcgacagaacgttgccgaccggctcctggaagtaagtcgcaaacagcggggcgaaaataaacaggccccacatgccgtacacgatgctcgggattgccgccagcagctcaatcgcaatgcccagcggacgcttgagccaggcgggggacaattctgtcagaaacagcgcgatgccgaagctcaccggaacggcgatcagcagcgcgataaaagaggtgaccagggttccgtaaatcgggaccagcgcgccgaagatctcgttaggcgcatcccactctttggtccacaaaaaggcaaagccaaacttttgaatgctcggccaggaagagatgatcagggaaacgatgatgccgcccagcatcaatagcacaatcagcgcagccagttttaccagcgcactgaaaatcatgtcaccctttttccccggaggggtaaatgcaggcttggttgcagccatagattactctttacgtattaaaacttgttcgaataaatgcccggtggcgttggctcccgggcctacagtctgaaccgtagggcgggcagcgcctgaacgcccccgccatcttcgtcaaaaatctactgttagtacagcgctttaccgctgctgtctttgacgttggttttccatgccgcgcgaacctgctctaccacgctttccggcagcgtcgcgtaatccagcgcattcgcttctttcccgccgtttttatacgcccagtcgaagaacttcagcacttcagcggtctgttccggcttgttggtcgccttatgcaccaggatgaaggtggttgaggtgatcggccatgcattttcgcctttctggttggtcaggtcctgagcgaaagacttgctccagtcaacgccttttgcggcgttagcgaagttgtcttcagtcgggctaaccggcttgccgtcggcagagaccagtttggtgtaggccaggttgttttgcttagcgtaagcgtattcgacgtaaccaatcgagccaggcagacgctgaacaaaggcggcgataccatcgttgcctttaccgcccagaccggttggccagtttacggtagagccggcgccgattttcgatttccactcttcattcactttggacaggtagctggtgaaaacgaaggaggtacctgaaccatcggcgcggcggaccacggcgatgttctgcgacggcagcttcaggcccgggttgagcttagcgatcgcttcgtcatcccattttttaattttacccaggtagatatcaccgagggttttgccatccagcaccagctcgccggatttcacgccaggcaggttaaccgccagtaccacgccgccaatcacggtggggaactggaacagaccttcctgggtcagtttgtcatcagccagcggagcatcagaagcaccgaaatcaacggtgttggcaataatctgcttaacgccaccagaggaaccaataccctggtagttcactttattgccggtttctttctgataggtatcagcccatttggcatacaccggcgcagggaaagttgcgcctgcgccagtcaggcttgctgctgcgaaggcagagaaagcgctcatcgataaggtcgcggcgacaactgttgcgacggtggtacgcataacgttcataatgtctcctgctgggattcgtaaatcattgtttcgaggctatggtgagcaaaataggtcaaagaggtgacagtaaaatgtacgaattatgacagttttatgacaggccgggagagtggattttacgccaaataatacgcttataactcagatggttatctttaatcatgaccgtggaatgacaaaataattttctttttatgacggcgaaatcggaccgtaaaacgatcgtttgtcatctaccgccagccaaaatattgcgcacgtaatcggtggaaaacagcaggtgcaaataaaaagggccgccgtcggcagccctttgcaggataggatgctttactcaaccgttaccgatttcgccaggttacgcggctggtcaacgtcagtgcctttgatcagcgcgacgtgataagccaacagctgcagcggaaccgtatagaagataggggcgatggtctcttccacatgcggcatctcaatgatgtgcatgttatcgctaccgttgaagccggcttcaccgtcggcgaagacgtatagttcaccgccgcgggcacgaacctcttcgatgttggatttcagtttttccagcagttcgttgttcggcgccaccacaatcaccggcatttccgcatcaatcagcgccagtgggccgtgcttaagctcgcccgccgcataggcttccgcgtgaatgtaggagatctctttcagcttcagcgccccttccatagcgatcggatactgatcgccacggccaaggaacagcgcatggtgcttatcagagaagcgctctgccagctgctcaatacgcttgtcctgggagagcatctgctcgatacggttcggcagagcctgaaggccgtgcacgatatcatgctcgatagacgcatcctgacctttcagtcgcgccagtttcgccaccagcatcaacagcacggttagctgagtggtaaaggctttggtcgaggccacgccgatttccgttccggctttggtcatcagcgccagatcggactcgcgcaccagcgacgagcccggcacgttgcagatggccagcgagccgagatagcccagctctttcgacagacgcagcgccgccagggtatcggcggtttcaccagactgggagagggtgatcatcaggctattgcgacgcactgcggacttgcgatagcggaattccgaggcgatttccacatcgcacgggacgccggctaacgcttcgaaccagtagcgggaaaccatcccggagttataggaagtcccgcaggcaactatctgaatatgttcaacctgagccagcatttcattggcgttgggccccagttcgctgagatccacttcgccatggctgatgcgcccggtcagggtgttcttaatcgcgttcggctgctcgaaaatctctttctgcatatagtggcggtagatacctttatcgccagcgtcatactgcagattggattcgatctcctggcgcttcacttccgcgccggatttatcgaaaatcaccaccgaacggcgagtcacttccgcgatatcgccttcttcaaggaagatgaagcggcgggtaaccggcagcaatgccagctggtcggaggcgataaagttttcacccatccccaggccaattaccagcgggctaccggagcgggccgccagcagagttcccgggtcacgggtatccatgatcaccgtaccgtaagcgccgcgcagctgcgggatagcgcgcaggacggcttcacgcaaggtaccgccttgttccagctcccagtgcaccagatgggcaataacttcggtatcggtctcggtgacgaagacatagccgcgagactgcagcagggcgcgcagcggctcatggttttcgatgatcccgttatggaccaccacaatgtgttcagaaacatgcggatgcgcattgctctcagacggttcgccgtgcgtcgcccaacgagtatgggcgatcccggtaccaccgtgtaacggttgctcttctaccgcctgagccagcatctgaactttacccaggcgacgcacgcgggtcatatgaccttcgctgtcgaccactgccagaccggcagagtcatagccacggtattccagacgacgtaaaccttcgagaaggatttcagcaatatcacgctgcgcgactgcgccaacaattccacacatagttaaatttcctgataatggcgatatgccatgcgttgtcgctgacctgtatttgcccgttttccgggcgccccgagccttgtagagagtggggttattgttatggtacttcctgcggacggggatctatgttgaccctctcatcctggttcgccgggaaaatttccccggcgataatccaaattatttcttcttcaccggacgctgccagccctgtttgtggacctgcggtacgcggctcaacactagttcgttatcagcgatattgcgcgtgacggtggtgccggcggcgatcgtgacgccgttgcctaccgtgaccggggccaccagctgggtatccgagccgacaaagacatcatcgccaataatcgttttatgcttgttcgcaccatcgtagttgcaggtgatggtgcccgcgccgatattgacgttatcgccaatctccgcatcgcccagataggtcagatgacccgccttggagcctttcccgagacgcgcttttttcatttccacgaagttaccaacgtgggcgccttccagcagttcggcgcccgggcgcagacgggcaaatggaccgatggtgcaggccgcctgcagctgggcatcttccaccacgctgtaggggctaatttcgcagtcatcgccgatggtgctgtttttgatcacgcagccggcgccgattttcactcgatcgcccagcaccacgttgccttccagaataacgttagtatcgatctctacatcgcgcccgtgctgcagcgtaccgcgcagatcgaaacgcgccggatcgcgcagcatcacgcccgccagcagcagcttttcggcctgctccgcctggtagacgcgctccaggcgcgcaagctgcaggcggttgttgacgccttcgacttcgctcaggcgctgcggatgcactgcgacgatctggtgtccttcctggtgcgccatggcgatgatatcggtgatgtagtattcgccctgagcgttgttattggtgagtttcgccagccagcgctttagatccgctccgccggcgatcaggatcccggtgttgatttcctggatctggcgctgggcctcgctggcatctttgtgctcaacgatgcccgtcacctggccattttcacgggtaatgcggccatagccggttgggtcatccagcttcaccgttaacagaccaatcccaccctgtggtttcgcggcgcgcaggcgctgtagcgtctcaacggagatcagcggcacgtcgccatagagcatcaggatgtcttcatcatcattgaagaatggcgccgcctgctgcatagcgtgcccggttccgagctgctcggcctgcagcacccagttcaggttgtcttcatgcagagtctgacgcagcagatcgccgccgtggccatataccaggtgtaccgcacatgcgcctaaatcgttagcggcatcaatgacatgctgcaccattggcttcccggccagggtatgcagcaccttaggaagatcggaatacatgcgggtccctttgcctgcagcaaggataaccacgctcatcgcactatttgacatactcatcctgacggtagttagaacgaaaagtaaaagcctttcacgttgaaatttctacatatttttcatcataaaacgagacgtggagaaaacgtccaggctcactgttttaccccattttatgacgctatttttaaccactgcaaatcagtttaacgctgaaaaaggagggcggggtggagaatcattaactatctcactgcttttgctgttttttcgccacctgaataaagccgcagcggcaggcgtttatcagcacccacagcgggaagaaccaggataaatattcgccagtcgctggcgggggagggcggtaaagtgattgatgctatccataaaaaacgaaaggccacctatcaggtgaccttcttttcccggtttcacatcgccagtgttgtcgttttgatgggcgatacgtcgtgtcagcgggcgagatagcgcggagcttagaagctcagaacgctaaatttagcgatgattttatggaacagtttcatgatgatttcctgacgcaggtgcagtttataacgctcttttttgtgatatacatcacataaaaagagtttacgcctcatcatttaactaatcaataacaattaagggtgaatgctgttttcacttcatccgctcgtcagcagcgggcaataaaaaaagccagcctggaacccagactggctttttacgttcaagccggtgttacatcgcttttttggtcaactcgataacgcgcagtttagcgatcgctttggccagttccgcagacgcctgagcgtaatccacatcgccgtgagagctcttaatgtgctcttccgctttgcgtttcgcttccagcgctcgcgcttcgtcgaggtcctgaccgcgaattgcggtatccgccaggacggtcacgctgccaggctgcacttcaagaatgccgccggacagatagataaactcttcatgaccgtgctgtttaacgatgcgaatcataccaggcttaatggcggtgagcagcggcgcgtggcccgggtaaatacccagttcaccttcgctacccgttacctggattttttcgaccagaccagagaacatttgttgctctgcgctgacgacgtccaggtggtaagtcattgccatatcaccctccgattaaggcgttaaagttttttggctttttccacggcttcgtcgatggaaccgaccatgtagaacgcctgctctggcaggtgatcgtattcgccttccatgatgcctttaaagccacggatggtgtctttcagcgccacgtatttgcccggagaaccggtaaagacttctgccacgaagaacggctgggacaggaagcgctggatcttacgcgcgcgagctaccaccagtttgtcttcttcagacagttcgtccataccgaggatggcgataatgtctttcagttcctgataacgctgcaggatggactgaacgccacgcgcggtgtcgtagtgttcctgaccaacaaccagcggatccagctgacggctggtggaatccagcgggtcaacggccgggtagatacccagggatgcgatctgacggctcagtactacggttgcatctaagtgagcaaaggtagtggctggggatgggtcagttaagtcatccgccggtacgtataccgcctgtacggaggtgatagaaccggttttggtggaggtgatacgttcctgcagaacgcccatctcttccgccagggtcggctgataacctaccgctgaaggcatacgacccagcagcgcggatacttcagtaccggccagggtgtaacgatagatgttatcgacgaacagcagtacgtcacgaccttcgtcacggaatttctcagccatggtcaggccggtcagcgcaacgcgcagacggtttcccggcggctcgttcatctggccgtacaccagggatactttatcgataacgttggagtcggtcatttcgtggtagaagtcgttaccctcacgagtacgctcacctacgcccgcaaacacagagtaaccggagtgctcgatcgcgatgttacggatcagctccatcatgtttacagttttacctacacccgcaccgccgaacagaccaactttaccgcccttggcgaacggacacatcaggtcgataactttaataccggtttccagcagttcctgagagctggacagctcttcataggacggtgccgcgcggtggatagcccaacgctcttcttcgccgatgtcgcctttcatgtcaaccggttgacccagtacgttcatgatacgacccagcgttgctttacctaccgggacttcgatcgggtgctcgaggtcttttacatccagaccgcggcgcagaccatcagaagaacccatggcgatggtacgtacgataccgccgcccagctgctgctgaacttccagcaccagaacttcattaccattctgtacctcaagggcttcgtacacgcgtggtacggcatcctgagggaactcgacgtcgaccacggcgccgattacctggacaatctttccagtagccatcttaaatcctctacgaaataacctggttaaaccgcggcggcccccgagacgatctcggtgagttcctgagtaatgctggcctgacgagctttgttgtataccaactgcagctctttaatcaggctgccgccattatcggtcgcggctttcatcgccaccatacgggcggcctgctcgctggccaggttttcaaccacgccctgataaacctgagattcgacgtagcggcgcaggagggtatccagcagcgctttcggatcgggctcatacaggtaatcccaggatttacgtttcagatcagcatcttctgatgccggtaacggcagcagctgagtgatcgtcggaacctgagacatggtgttaataaatttgttgctgacaacgtacagcttgtccagacggccttcatcataggcctgcaacatcacttttaccgggccgatcagttcggacagggatgggttatcccccataccggtcacctgtgcaaccacgttgccgcccacggagttaaagaaagaaacgcccttagagccgatcattgcgaggtcgcactgaacgcctttatcggaccatgctttcatttccgccagcagtttcttgaacaggttaatgttcaagccgccgcacagaccacggtcggtcgacaccaccaggtagcccacgcgcttaacgtcgcgttcttccaggtaagggtgcttatattccagattaccgttcgcaaggtgaccaatcactttgcgcatagtatctgcgtaaggacggctggccgccatgcgctcctgcgatttacgcattttggaagcggcgaccatctccatcgctttagtgatcttttgcgtgttctggacgcttgcgatcttactacgtatctcttttgcgccggccatgagcttctcctcaatgccttgcggcctgccctaagacagaccgccagacgttaccaggactgggttgctttgaaggaatcgaggatgcctttcagcttgccttcgatttcgtcgttatagccaccggactggttaatctcttgcatcagcggagcgtgatcacggtcgacgtaagccagcagagcggcttcgaagctaccgattttcgccagttctacatcagccaggtaaccacgttctgctgcgaacagaaccagagactgctgcgcgacggacatcggcgcatactgtttctgtttcagcagctcggtcactttctgaccgtggtccagctgtttgcgggttgcatcgtcaaggtcggatgcaaactgggagaacgccgccagttcacgatactgcgccagcgcggtacggataccaccggacagtttcttcatgatcttggtctgcgctgcaccaccaacacgggatacggagatacccgggttaaccgcaggacgaataccggcgttaaacaggttggtttccaggaagatctgaccatcggtaatagagattacgttggtcggaacgaatgcggaaacgtcacccgcctgcgtttcgataatcggcagcgcggtcagagaacctgttttccctttcacttcacctttggtgaaggcttcaacgtattcggcgttaacacgcgcagcacgctccagcagacgagagtggaggtagaatacgtcgcccgggaacgcttcacgtccaggcggacgacggagcagcagggagatctggcgataagcaacagcctgtttagacagatcatcgtaaacgatcagcgcatcttcaccgcggtcgcggaagtattcgcccattgcgcaaccagcgtatggcgccaggtattgcagtgcagcagattcagatgcagtcgctaccactacgatggtgttagccagcgcgccgtgctcttccagtttacgcaccacgttagagatggtggacgctttctgaccgatagcgacatagacgcacttgatgccggaatcacgctggttgatgatggcatcgatagccagcgcagttttaccggtctgacggtcgccgatgatcagttcacgctgaccacgaccgattgggatcatggcgtcaacggatttgtaaccggtctgtaccggctgatcgacggactgacgttcgattacgcccggcgcgatcgcttcaacggcggagaaaccgtcgttttccagcggacctttaccatcaattggcgcgcccagggtgttaaccacgcggcccagcaggccacggcctaccggaacttccaggatacggccagtacatttcaccttcatgccttcggcgaggtcagcgtacggacccattaccaccgcacctacggagtcgcgctccaggttcagtgcgatagcgtaacggttacccggcagggagatcatctcgccctgcatacattcggcaaggccgtggatgcggataacaccgtcacttacagaaacaatagtaccttcgttatgagcttcgctcacaacattgaactgagcaatgcgctgcttgatcagttcgctgatttcggtggaattcagttgcatgctccagtccccttaagactgcaagacgtctgcaaggcgctcaagacggccgcgtacgctgccatcaatgaccatatcacccgcacggatgataatacctgccataacagacttatcgattttgcaattcagcttaactttgcgtgacagacgtttttccatcgcgctgacgatcctggcaagctgttcatcactcagttggttggcagatattacttctacctctgcgatggcctcactggccgcgcgcaggtgaatgaattgctcaagaacgtccgggagcaccttcagacgattattttccgccatcaccttaatcaggttctggccattttcgtcgagttgctcgccgcagatagcgataaacgcttctgagagcgtttccggcgccaaagcaccggagagaagctctgccatttggtcgtttttggtcacttcggcggcaaacgccagcatatcctgccagcgttcaacactgttgtgttcgacggcaaagtcaaaagctgctttggcgtaggggcgagctaccgttacaaattcagacatcagcccctccctccttacagttcagcgacaagtttatccacgatgtcgctgttagcagcttcatccacggaacgttcgatgatcttctcggcgccagcaacagccaggatagcgacctgcttacgcagctcctcgcgtgcacgtttacgctcagcatcaatttcagcctgcgcttgtgcaacgattttggtgcgttcctgttctgcttcagctttagcttcgtccagaatctgagagcggcgcttgttcgcctgctcaatgattacctgggcttccgctttcgcttttttcagctggtcggtcgcgttggcctgtgcaaggtccaaatctttcttagcgcgttctgcagaagctaaaccgtcagaaatctctttctggcgtttttcgatggcagccattaaaggcggccatacgtatttcatgcagaaccatacgaagataacaaacgcgatggcctggccgaggattgttgcgttcatgttcacagcacaatacctctttaattaactctgtggcttaggtttctaacaacttactacgcgacggcgaacatcacgtacagacccagacctacagcgatcatcgggatagcatccaccagacccataacgataaagaactgagtacgcagcagagggatcagatccggctgacgcgctgcgccttccaggaatttacctccgaggatgccgataccgatcgcagcaccgattgccgccagacccatcatcacagcggcagccatgtacagcagatccatattcaggttttccatgacagtctccagtttgtttcagttaaaacgtagtagtgttggtaaaaaatcaatgctcttcagatgccatcgacagatagacaatcgtcagaaccatgaagatgaaggcttgcagcgtaataatcaggatgtggaaaatggcccaaggcacattcagaacccactgtgaccaccacggcaacagaccagcaatcagaatgaaaatcagctcaccggcatacatgttgccgaacagtcgcagaccgagagagaccggtttggacagcaggcttaccccttcaaggattaagttgacaggaatgaacgcccagtgattgaacggctgcatggtcagttctttaacgaacccaccaacgcctttcattttgatgctgtagaaaataatcaggatgaacacgccaagcgccatcgacagggtgatgttcacgtcggcagacggaaccacgcgcagtgctggcaggccgaaaatgtgttcgccgatataaggaagcaggtcgattggcagcaggtccatcaggttcatcaggaagacccagacgaacacggtcagcgccagcggcgcgataaccttgctcttgccatggtacatgtctttgacgctgccatggacgaagccgatgatcatttcgatgaaggtttggaatttccctggtacgccgctggtcgctttcttagcaacgctacggaacatggcaaggaacagcagaccgagaaccaccgagaagaacatggagtcaatgttgagcgtccagaaggtggctgtgtggttgtgcggatccaccagcgagaatgtacgcaggtccaactgaaggttgttcagatggtgtcctatgtaatcctgcggcgtcatattttctgaagccatgatgcctttaccctttgttgttaattacagctggcgccagaacttgtaccaccagcaccaaaacccacgtcacgatcagtggcaaaaataccacttttaaaacggccagcgccaccgccagaagggcgaaggtcagcaacaccttgaaggcttcaccgaaggcgaaggtccaggccacacggccttttgctggtgtatgcgcctgatgacgccaggcaaaaattataaacatcagatttggcaagaccactgccaaaccgccgcatacagcggaaatgccccagaaggggtctttgaggctgaacagcagtccacttgccattactgccagtaactgaataaacagaagcttgcgagcaacgtttcgactcaagagcgacactgacatcacgtttttactcctgctccctttgaggtatgtcgcgtgtcgtataaaacgtcctttaagacgaagagtcaagcatcaaaaagcggacaaattatacggtgacgccccgtgatttcaaacaataagtagcaaaatagtgaataaatgtttaattattttccaacggacaactttccgtgcatttcagcgttctgtgagcggtcatacaaaactgcaaataacgaggaaacacggcaattaaagcgtgcatcagatcacataataaacatttcaagcgccctttaatgaatcaaggacataaaacactatttttcatgcttttgatattcaagataaaaagtgaggacattatctaaaacaaccccacatacaataaaaaccttttattgacatttataataaaaatttaacatcactatgctgttcatcattgtcgatttttagcaccctgatattttcaaagttgactattttgtcagtgaatcacttacgctaagttaactgcaagaaaagccttagtaaaaacaaggttaaatgcggcccgttaatatcgggggacgtcctttatttttgtaacatgcgcgggccacattttttccacattttttgataaaaattaactcgattttggcttaatcaccaccaggtgccgctccccttccaaccgaggaacatgcagctcaatcacctcgacaatgtcatacccttccggcagactttccatttcttctttttgcgctaaccctttgagcgcatagaagtgaccattcgctgccggcagatgatggcaccagctcaccatatcattaagcgatgcgaaagcgcggcttatcacgccatcaaacggcggctcggccgggaaggcttccacgcgactctgcaccggggtgacgttatccagcttcagctcgtgctgcacctgacgcaggaagcgcacgcgcttgccaaggctgtccagcagggtgaaatgtgactccggacatacgatggccaacgggatccccggcaaccccgggcccgtaccaacatcgataaagcgcgagccctgcagataaggcgccacgatgatgctgtcgagaatatgacgcaccagcatctcattcggatcgcgaacggaggtcaggttataggctttgttccacttatcgagcagtccgacgtaagccaccagctgatttttctggtgatcggtgagcgaaatacccgcttcatccagcagacgagaaagtttgttgagcacggtaagtaccttcaaaaaataatgagcccggaggcgctaacgcttaccgggctatgaatgataaaggcgaacgctgattatgcaactgggaaatcagcgcggcaggcagccgcaatcaggcgctgcggcgcagcatcccctgctttttcagccaaaccagcaaaatagagatcgccgccggggtgatcccagagatacgtgacgcctgccctatcgacgacggtttatggtcgttcagtttggcaatcacctcgttagacagcccagtgacctggcggtagtcgagggtcgctggcagcaaggtattctcattgcgctgttgtttctcaatctcatcctgctggcgcgcgatatagccctcatacttcacctggatctctacctgttcagccgcctgacgatcttccagtcccggggtgaatggcgagagttgaaccagctgttcgtaggtcatttccggacgacgcagcagatcttcgccgctagcttcacgcgacaacggcgcggtcaggtgagcgttcacttcgttggcgctctctgcctgcggattcacccaggtggatttcagacgctggcgttcacgttcgatgctttccagcttctcgttgtagcgcgcccagcgttcgtcatccaccagacccagctcgcgcccctgttcggtcaaacgcaaatcggcgttgtcttcgcgcagcatcagacgatattcagcgcgggaagtaaacatgcggtacggctctttggtacccagggtgcagaggtcatctaccagcacgccgaggtaagcctgatcgcgacgcggcgcccagccctctttttccgcagagaagcgggcggcgttaagtccggccagcagcccctgagccgccgcctcttcataaccggtggtaccgttgatttggccggcgaagaacagaccctgaataaatttgctctcaagcgttggcttcagatcgcgcgggtcgaagaaatcgtactcaatagcgtagcctggacggacgatccgcgcattctccatcccctgcatcgagcggacgatttgcatttgcacatcaaacggtaggctggtggatataccgttcggataaatttcgtttgaggtcagtccttccggctcgaggaagatctgatgctggttgcgatcggcaaagcgcatgactttgtcttcgatcgacgggcaatagcgaggtccgatcccttcgatcactccggcgtacataggactgcgatcgaggttattgcggatcacatcgtgggttttctcgttagtgtgggtgatatagcacggtacctggcgcggatgctgatccgcggatcccatgaacgagaagaccggcatcgggttatcgccatgctgctgcgccagcacgctgaaatcgatggtgcgcgcgtcaatacgcggcggagtaccggttttcagacgacttacgcgcagaggcaattcacgcagacgacgagacagcgggatagacggcggatcgccggcgcggccgccgctgtagttgtccagaccaatatggattttgccgtcaaggaaggtcccgacggtcagcactaccgctttagcgcggaatttgaggcccatctgggtgacggcgcccacgacgcgatcgttttcgacaatcagatcttcaaccgcctgctggaagatcatcaggttcggctggttctccagcgcggtacgtactgcctgacgataaagcacgcggtcagcctgggcgcgggtggcgcgcactgccggtcctttgctggcgtttagtatcctaaactgaatacccgcctgatcgatcgctttggccatcaaaccgccgagcgcatccacttcttttaccaggtgtcctttcccaatgccgccaatcgccgggttgcaactcatttgccccagcgtgtcgatattgtgtgtcaaaagcagggtttgttgacccatacgcgctgcggccattgcggcctcagtgcctgcatgacccccgccaatgataatgacgtcaaaaggatcctgataaaacatggtggtctgcctcgcataaagcggtatgaaaatggattgaagcccgggccgtggattctactcaactttcgtctttcgagaaagactccgggatcctgagtattaaaaagaagatctttatatagagatctgttctattgtgatctcttattaggatcgactctctttgtggataagtcggatccgcgaagtaagatcaaaagcttaagaaggatcactatctgtgaatgatcggtgatcctggtccgtataagctgggatcagaatgaagggttatgcacagctcaaaaaccatactacggttattctttggataactaccggttgatccaagcttttaagcatggttatccacagaagatcgggcgatctttacaattctcagagcaaatttttccaggatcccagccagatttccgctggatcctccggaatttcgtgttcaaggacgttgatcttcagcgtctcaccgatctgttttgccccgcaggccttcagcgccgcttctaatttatcgatcgcgccgcaaaaggtgtcgtattcgcggctgccgatccctatagcgccaaagcgcacggcggaaagatcggcctgcttctcctgcagcgcgtcatagaagggaaccaggttgtcgggaatgtcgccggcgccatgggtggaagagataattaaccagatcccttgcgcctgcagatcgtccaccagcggaccgtgctggatttcagtgctatagccggcttcttccagcttttccgccagatgctctgctacatattccgcactgcccagggtgctgccgctgataagtgtaatgtctgccatagatcgccgatcgcccgctcaactgttcagagtggcgtattgtacgctgtgagcgagctgggatctacctgtggaaaaatgtgggattaaaaaaagcgatcagggcttgatggtgcgcatgatcgggttctgcagcacgatcagagtttcagtggactgaatttcatcgattgtttggatcttgttgataagtacctgctgcagagcatcgatggatttacacatcaccttaataaagatgctgtagtggccggtggtgtagtaagcctcggtgacctcctccagactttccaggcgggcgagggcggagggatagtctttggcgctttttaaaataatgccgatgaagcaaccgacgtcgtagcccagctgcttggggctgacgtcaatgcgcgcgccggtaatgatacccgcctgcttcatcttttcgacgcgcacgtgaatggtgcccgggctgacgctgaactgtttggccagttcggcataggcggtacgggcgttggccatcagcgcatcaagaatgccgcggtcaagattgtcgatctgataattttccatatctttttcttatgaagtttgagggttcttactattttagcgccatattttaatgaattaaaagttgatgcgcctttttattgattgattgttgtattgccgccctgttttgttgcttaatcaatggcaacaggacgcaggagtcataaaaatgaaaaccgcatatatcgcaaaacaacgccagatcagtttcgttaaatcccacttttcccgtcagctggaagagaagcttggcctgattgaagtccaggcgccaatcttaagccgcgtgggcgatgggacgcaggataacttgtccggctgcgagaaagcggttcaggtaaaagtgaaaacactgcccgacgcccagttcgaagtggttcattcgctggcgaagtggaagcgtcaaaccctgggacaacacgacttcagcgcgggcgaagggctgtacacgcacatgaaagcccttcgccccgatgaagaccgtctgacgcctatccattccgtctatgttgaccagtgggactgggagcgcgtgatgggggatgaagagcgtcacgtcggcaccctgaaggcaaccgtcgaggcgatctacgccgggatcaaagccaccgagctggcggtcagcctggagtttggcctgacgccgttcctgccggaacagatccattttgttcacagccaggagctgctgagccgctatccggagcttgatgccaaaggtcgtgagcgggctattgccaaagagctgggcgccgtcttcttaattggtatcggcggcaaactagctgatggcaagcgccacgacgtgcgtgcgccggattatgatgactggagtactgaggtttctgaaggttttgccggcctgaatggcgatatcctggtgtggaacccggtgctggaggatgcgttcgagatctcctcgatggggatccgcgttgacgccgaggcgctaaagcgccagctggcgctgaccggcgatgaagatcgcctgaaactggagtggcaccaggcgctgctgcgcggcgagatgccgcagactatcggcggcggcattggccagtctcgtttgacgatgctgttgctgcagcttgaccatatcggtcaggtgcagtgcggcgtatggccggcgcaggttcgcgaaagcgtttccgcgctgctgtaacgattagcgcagccagcgtcgcagcaggcggctacgcagcccggtgtcaaagcgccagatatgatcgaagatgcgcatgatgccgggtttgccgtgaaccgacatcgccaccgcgtgaaaacggtgctgatgcttacgctgtaactcccccacctgagcaatcacctcatccggcaaccgttgggcaataaagtcggagatcaccacggcatccgcatccacccactgcgggttttgcaaacgttcaataatggcgcgaaaacagctggccagatcggtgccgccgcgaaaacgctggctcaggaaacggatcgcctgctccagtccgctctcgctggtcaactcgtaatgcaccacttcgctggaaaacagcataatgaagcagcgacggttatcggccagcgcgatgcgcatcagggccagacaaaaggccttagcgcactgttcgttaaaaccgcccatcgatcctgacgtatcgacgcagacaatgaacggcccgcgcggttgctcatcaaaatcctgccgcgttaccgggcgttcggtaattttctcgcgccaggcatcgccgtgtagccggtaggtgagcagctgtttctccaccagcttgcgataaaattcaaactccagctccgtgatgccaagcgtcgccagctccggcggcagcaggcgtagaatgtcgtcactctgctggaggccgtcgacctgttcaggcaccgttgctggctcgcgtaccaggctgcggaaggtttccatcggcgcatctttcttcggcacggatttcgcttcccttgaacgccccagctgttccgccagctgcagcagctccggttgctggttaagaaaatcgccatagcgcacgatcagctggtagtcgcctcgtttgagttcgccggcgctcatatcccacaggcgtccggcggcggtatcattttccgccagcaccggatcgagctgaccgctgagcgtcattcgttcctggacctcactgagcaactggtcgcgctcatcgtccagcagctgctggttaaggctggtggcttgcaccaccaggctcaggcgccagcgctgtaaaaacagcgtatgcagcgccggggtaaaggtggcattgtcatccaccagcttctgcgcctgggcggcaaaaggggactggagctggtgcagtttgccgagaatttgcgggagctggacgataaactgcgaggtagagagcagctgagcctgctgataggtttgcacttcggcgtccagatccggcgggatgttaacttcttttaagcgggcgcgaacggcttcccgccagcgcggaatatccgccgcgatgatgtttttcaggcggggaaatttttcaaagaacaccgccagctgaggagaggccaacagcgccagcagcatctcctcgatcattccctcttcgctgactgccagcatgacattcagcatatcgagcgtcatggctgcttcgcctgtttaatctgcgcgccgacgtcctgcaggctggcttcgattcttcccagccattcgaccgggataaacaggcacttttgctgctcgctgaagcggttgtgttgctggtgccactcatcatccagcgcttccagctgctggcgaatttccgccggcatattctcctgcgctgcgctgccgggcagcgcgaggcgtgagccctgcaggctcacatcgcggacgaccagatgctggctggtgtcgacatccatattgagtagttgggcaaagccgatcccgttgagcttaccgcggatctcgccgcccttttccagccagttggctaacgcctcgcgttcaaaagtaatgtggatcacttccatatcgtgaagtttgagcggctgctgcagcagcagcgtcagggtggtcccctggatctccgccggcagttcatagtgcggtttgcggctaaacatcccgccaaggcgggtgaccttcagcgccgttttgtcgctttgctgttgttggatctgaatgcgtcgctgcacaatcgcccccaaccgcgtcagcatcgcctgctgttgccaggcgtgacaggtcatgagcgtttccagctgctgcgacatcaagttcatactttcgacgttgtgccacagacaatctttcagcaggataaggtcgattggcgcgatgctgtcgcggccgctgaagaaggcgctggcctgcagcaggcgaatagcctttttccagcggcgatccgagacgtagggggcatttggctgggcgtccagctgctggcggagctggaatatcagctcaaacaccgcgtccggcagtttaatattgccgatctgctgctgccattgggtaaattcctcgtcgctcacctgcagcgcgctgggcactggattgctgttttcatcctgctggctgaccagcatcgaacggaaattacctttatcctgcactttatcaagccatagacggatcagcattcggtcatacagcgcttccaggctgctgtcggcttccgggagttcgttcgacgcggccaccagcaggcgcattgggattttctcttcatgcgcgccattgcggaagtgacgttcgttaatcgccgtcagtagggtgttgaggatagccggacctgctttccatatttcatcgagaaacacgatttccgcttccggcaggtagccggcggttaaacgttcgtaacggccttcatctttcagcgcctgaatggacagtggcccaaatacctcttccggggtggagaagcgggtcatcaggtattcaaaagcgcgcgcctgctggaaggcgaatttgaggcggcgggcaatcaggcttttggcgatccccggtggaccaagcaaaaaaacgctctcgccgctgagcgccgccagcaggcagaggcgtatcgcgtggctgcgttcaaagagtcctttttcgagtgccgcgctgagccgggaaattctttcagccagtaaatgtgtttgagccataattgagttgcgtgctttgtcatgtatcgttattgggacgagtatagatgttagagccggggcggtaatagcctgaagaatcgatttattttttttgagccaggttaatatggtgtctgttaggggtacgatttcacaaataatcgtgcatactgtgcgctttttgtgggccaagggactaggcacacatttgttttataaacgaaaagactagtctatgagcactgataataaacaatcgttgccggcgttaacgctggcggccatcggcgtggtgtacggcgatatcggtaccagtccactgtataccctgcgcgaatgcctgtcaggtcagtttggctttggcgtagagcgcgatgccgtttttggctttttgtcgctgattttctggctgttaatctttaccgtatcgattaaatacatcaccttcgtgatgcgggcggataacgccggggaaggcgggatcttaacgctgatgtcgctggccggacgtaatacttcggccagaatgacctccgtgctggtgatcctcggccttatcggcggcagtttcttctatggcgaagtggtgattaccccggcgatttcggtaatgtcggcgatagaggggttagaaattatcgccccgcagctcgatacctggattgtccctatctccattatcgtgctcaccctgctgtttgtgatccagaagcacgggactggcatggtcggcaagctgtttgcgccgattatgctgatctggttcctgttgctggcggtgctgggcgcgcgaagcatttacgctaatccggaagttctgcaggcgctgaacccctactgggctgtgcacttcttcctgcaatacaagaccgtttcctttattgcgcttggcgcggtggtgctgtcgattaccggggtggaagcgctgtacgccgatatgggccacttcggcaaactgccgatccgcgtcgcctggttctccgtcgtgctgccctcgttggtgctgaactattttggccagggcgcgctgctgctgaagcacccggaagcgattaaaaacccgttcttcctgctggcgcctgagtgggcgctgatcccgatgctgattatcgccacgctggcgacggttatcgcctcccaggcagtgatttccggggtcttctccctgacccgtcaggcagtgcgtctgggctatctgtcgccgatgcgcattatccatacctcggaaatggagtccgggcagatttacattccgttcattaactggctgctgtacgtttctgtggtcatcgttatcgtcagctttgagcattcgtctaacctggcggcggcgtatggtatcgccgtaacgggcaccatggtgctgacctccattctgtcggcgaccgtggcgcgcaaaaactggcactggaacaagctgtttgtcggtctgatgctggtggccttcctgtgcattgatattccgctgttctcggcgaacctcgataagattgtctccggcggctggctaccgttgtccctggggatggtgatgtttacggtgatgacgacctggaagagcgagcgtttccgcctgctgcgccggatgcacgagcatggcaactcgctggaagcgatgatctcttcgctggagaagtcaccgccagtgcgtgtgccgggtactgcggtgtatatgtcccgcgccctgaacgtgatcccgtttgccctgctgcataacctgaagcacaacaaggtgctgcatgagcgagtgatcctcctgaccctgcgtaccgaagatgcgccttacgtgcataacgttcgccgggtgcagattgagcagctgtcaccgtccttctggcgggtggtggccagctacggctggcgggaaacgcctaacgttgaagaggtgttccaccgctgtggcctggaaggactcagctgccggatgatggagacctcgttctttatgtcgcatgagtcgctgattatcggtaaacggccatggtatctgcgcctgcgcggcaagctttatctgctgctgcagcgtaacgccctgcgggcgccggatcagtttgagatcccgccaaaccgggttatcgagctcggtacccaggtcgaaatctgatgtcaaaaaagcccttccattgcgaagggctttttgtttctcactccggttgttatgtcctgtcgctgcctcgcgaaacgtttcgatggcgatcacatttctctcttctggtgatggttttctgctcacacattgataataattattttagcgaaacgtttcgctagtggagcaaaagagaaaaaatgaaaaaaggcaccgtacttaacgctgatatttccgcggtcatttcccgcctgggccacaccgatacgctggtggtctgcgatgccggattaccggttccccgcagcagcacgcgcattgatatggcgctgactcagggcgtaccttcatttatgcaggtgctggaagtggtgacgacggaaatgcaggttgaagcggctgtcatcgcggaagagattaaaacccataatccgcagctccacgcgacgttgctcactcacctcgagcagctgcagcagcaccagggaaataccattgaaattcgttacaccagccatgagcagttcaaaaaacaaaccgcagacagtcaggcggtaattcgcagcggggagtgttccccgtttgcgaatatcattctctgtgccggcgtcacgttctgaggtcgccgtcatggaagccttattgcaactgaaagggatcgacaaagcgttccctggcgtcaaggcgctctccggcgcggcgctgaatgtctatgctggccgggtgatggcgctggtaggggaaaatggcgccggcaagtccactatgatgaaggtgttgaccgggatctacacccgtgatgccggctctttgctgtggttaggcaaagagacgacctttaacggcccaaaatcctcccaggaagctgggatcggcattatccatcaggaactgaacctgatccctcagttgacgatcgccgagaacatcttccttggccgcgagttcgttaaccgttttggcaaaatcgactggaagcagatgtatgccgaagccgacaagctgttggcaaagctgaatctccgctttaccagccagaaactggtgggcgatctatcgattggcgatcagcaaatggtggagatcgccaaagtgctgagcttcgaatcgaaagtcatcattatggatgaaccgaccgatgcgctgaccgataccgaaaccgaatcgctgttccgcgtcatccgcgaactgaagtcgcaggggcgcggtatcgtctatatctcccaccgtatgaaagagatcttcgagatttgcgacgacgtgacggtctttcgtgacgggcagtttatcgccgagcgcgaggtctcgtcgctggatgaggaccgacttatcgagatgatggtcggccgtaagctggaagaccaatatccacacctcgataaggcgcccggcgcggtgcgcctgaaggtcgacaacctctgcggcccgggggtggataacgtgacctttaccctgcgccagggggagatcctcggcgttgccgggctgatgggcgccgggcggaccgaactgatgaaagtgctgtacggcgcgctgccgcgcagcagcggttccgtgacgctcgatggccgcgaagtggtgacccgttcgccgcaggatggtctggcgaacggcattgtctatatctccgaagaccgtaagcgcgatggtctggttctcgggatgtcggtaaaagaaaacatgtccctgacggcgttgcgctatttcagccgggcgggcggtagtcttaagcataaagatgaacagcaggcggtgagtgatttcatccgcctgtttaacgtgaagacgccttcaatggagcaggcgatcggcctgctctccggcggcaaccagcaaaaggtcgccatcgcccgcgggctgatgacccggccgaaggtgctgatcctcgatgaaccgacccgcggcgtcgacgtcggggcgaagaaagagatctaccagctcatcaaccagttcaaagccgacggcctgagcatcattctggtctcctccgagatgccggaagtgttgggcatgagcgatcgcatcatagtgatgcatgaagggcatctcggcggtgaattcacacgcgagcaggccacccaggaagtattgatggctgccgctgtgggcaagcttaaccgtgtgaatcaggagtaagaaagatgacaacccaggctgtttctggtcgccgctatttcacaaaagcgtggctgatggagcaaaaatcgctgattgccctgctggtgctgatcgcggtggtatcgaccatgagccccaacttttttaccgtcaataacctgttcaatattctgcagcaaacctccgttaacgccattatggcggtagggatgacgctggtcatactgacctcggggatcgatctgtccgtcggctccctgctggcgctcaccggtgcggtggcagcgtcgatcgttggcattgaggttaatgcgctggtggcggtcgcggctgccctcgcattaggtgcggcgatcggcgcagtcaccggggtgattgtagcgagaggccgcgtgcaggccttcatcgccaccctggtgatgatgctgctgctgcgcggcgtaaccatggtgtacaccaacggcagcccgatcaataccggctttagcgataatgccgatctgtttggctggtttggcatcgggcgtccgctggggatcccgacgccggtatggatcatggcgattgtcttcctggcggcctggtacatgctgcaccatactcgcctgggccgttatatttatgccctgggcggtaatgaagcggcgacgcgtctgtccgggattagcgtcaataaagttaaaattatcgtttacgccttgtgcggaatgctggcttcgctggccgggatcatcgaagtggcgcgtctctcctccgcgcagccgacagcggggacgggctatgagctggacgccattgcggcggtggtgctcggcggcaccagcctcgctggtggcaaaggacgcattgtcggcacgctgattggtgcgctgatccttggcttcctgaataatggtcttaatcttttaggcgtttcttcctattaccagatgatcgttaaagcggtggtgattttgctggcggtactggtagataacaaaaagcagtaactgagaactctacaggacatcttaactatgaatatgaaaaaactggcgaccctggtctctgctgttgcgctaagtgcgaccgttagcgcgaacgcgatggccaaagacaccatcgctctggttatctctaccctcaacaacccgttcttcgtgtcgctgaaagacggcgcgcaaaaagaagctgacaagctgggctacaacctggtggtgctggattcccagaacaacccggcgaaagagctggcgaacgtccaggatttaacggtgcgcggcaccaagctgctgctgatcaaccccaccgactctgatgccgtcggcaacgccgtgaagatggcgaaccaggcgaaaatcccggtcatcactctcgaccgtcaggcgacaaaaggcgatgttgtgagccatatcgcctctgacaacgtgcagggtgggaaaatggctggcgattacatcgcgaaaaaagtgggtgaaagtgcaaaagtcattgagctgcagggcattgccggaacttctgcggctcgcgagcgtggcgaaggctttaaacaggccgtggcggcgcacaaattcaacgtcctggccagccagccggccgatttcgaccgcaccaaaggcctgaacgtgatgcagaacctgctgaccgcacatcctgacgtccaggcagtgttcgcgcaaaatgatgaaatggcgctgggcgccctgcgcgcgctgcagaccgcaggcaagtccgatgtgatggtggttggatttgacggcactccggatggcgaaaaagcagtaaacagtggcaaactggcggcgaccgtcgcacagttgccggagcagatcggcgcgaaaggcgttgagactgctgataaggtactgaagggcgaaaaagtggaagctaactacccggttgagctgaagctggtcgttaagcagtaatatgcgattcggactggcaacggtccgagggacaatataaaaaaagaaaagcagggcatgcgccaccggatcccggtggcgcgctttcccgggaacagaaatgatgaaaactgcaggcaaacttgtcgtccttggcagtatcaatgccgatcacattcttaaccttgacgctttcccgacgccgggcgaaaccgtcaccggccaccattatcaggtggcgttcggtggaaaaggggccaaccaggcggtggccgccgggcgcagcggagcggatatcgcgtttatcgcctgcaccggcgatgacgatatcggtgaacgcatccgtcgtcagctggcgagcgataaaatcgacgtggcgcccgtgcgcgcggttgccggggaagcgaccggggtggcgttaattttcgttaacgccgaaggtgagaatgtcatcggtattcatgccggcgccaatgcggcgctttccgtctcccaggttgaggcggaaaaagagcgtatcgccagcgcacaggcgttgttgatgcagctggagtcgccgctggagagcgtcatagcggcggcgaaaatcgcccatcaccatcacaccaccgtggtgctgaaccccgcgccagcgcgtgaactaccggatgaactgctggcgctggtggatattattacccctaacgaaaccgaagcggaaaagctgaccggtattcgcgttgagagtgacgaagatgcggcaaaagccgccgacgtgctgcatgccaaaggcattggtacggtgatgatcaccctcggcagccgcggcgtctggctcagtgccgaaggcgaaagccgccggatcccagggtttcgcgtacaggccattgatactatcgcggccggtgatacctttaacggcgcgctggtgaccgcgctgctggaagggaccgccctgccggaggcgattcgctttgcgcatgccgcagcggcgatcgccgtaacccgcaaaggcgctcagccgtccgtgccttggcgcacagagatcgatgaatttttagcgcaacaggggtaatgcttggctacgatgaaagatgtggcccgcatcgcgggcgtttccacatcgacggtgtcacacgtcatcaataaggaccgctttgtcagcgaggcgattaccgccaaagttgacgctgcgatcaaaagcctcaactacgccccctctgcgctggcgcgtagcctcaagctcaatcaaacccgtaccatcggcatgctgatcaccgccagtaccaatccgttttattcggagctggtgcggggcgtggagcgtagctgctttgagcggggttatagcctcgtgctctgcaataccgaaggtgatgagcagcgaatgaatcgtaatctggagacgctaatgcaaaaacgcgtcgatggattactcctgctgtgcacggagacccatcagccctccccggaaatcatgcagcgctatccgtcggtaccgacggttatgatggactgggccccctttgatggcgatagcgatctgattcaggataactcgctgctcggcggcgatatggcgacccagtatctgattgaccaggggcattcacgcattgcctgtattgccggcccgctggataaaaccccggcgcgcctgcgtcttgaaggctatcatgccgcgatggcgcgctgcggcctgccggttgccgaaggatacgtggtgaccagtgattttgagtttggcggcgggtttagcgcgatgcagcagctgctggcgttgccgcagcgtccgcaggcggtgtttgtcggtaacgatgcgatggcggttggcgcttatcaggcgttataccaggccgggctgcagattccgcaggatatggcgctggtgggctacgatgatattgagctggcacgttatatgacgccgccattgaccaccattcaccagccaaaggatgagctgggggaactggccatcgacgtactgatccatcgcatggccgatccgcagcaaaaacagcagcgcgttcagttaacgccggagctggtggttcgcggttccgcttagcgtttatgccgctcgctaatcaggttgcggccatccttcgctcttaacagcataaacatcagcgccgatataatggttatcacgcccatggttataaaggtgtagtgaaactgctgtaccgtgcttgcattatcaaaaccttcatagaagcgtagcaccgcagcgctgatggccaccccgagactaattgaaagctgctgggtgacggccagcaggctgttgccgctgctggcattatcatcggtcagatcggccagggtaatggtattcatggcggtaaactgcgtggacatcgccatccccagcacgaacagcggcagaagaagcatccacagcggcatctctggcgactgcagcgagaactgggcgatcataaggccaataaacacggtgatccccaccagggtcttacgatagccaaaccagcgcagcacctgggtaacggtggatttcgcaataatcgagccgatagcggtgggggcgatcatacagccggcgataatggccggatagccgaaaccaacctgtagcatcagcggcatcagaaacggtacgcagccggtacccaaccgcgtggcgaggttgccggcaatgccgaccgagaacgtatgggtcttaaataaagagagcgagataagcggcgtcggatggcgacgcgcgtgacgcacataggccacgagcagtaacagactgacggcaatcacggccagcgcctgccatgtcgccacgattttttccccaaacagttcaataccgctggaaaataacaccagacttaagccaaataacagaaaaccgcctatatcgaagcgtcggcgcggcgttgtgaaatttggcatgtatttacgggcgtacagaatgccaattacgccgatcggaatgtttatcaggaaaatccaatgccagctggcccaggtcacaaataccccgccgagtaccgggcccagaatcggccccaccaatcccggcatggtgacaaagttcaggaccggcaacagttcgctgcgggggtaggcacgcagcagggccagcctcgccaccggcatcatcatcgccccaccgatcccctgaattacgcgaaaaatgaccagttccgttaaggaactggagagggcgcaggcgagggaaccgagggtgaacaggctaacggcgatgataaagacccggcgcgtgccgaagcgatcggccagccagccgctgaccgggatcagcatcgccaccgtcagcgtatagctgataatggccgactgcatcgctaagggagaacgattaagactgtgggcgatagccgggagggcggtgttaagaatggtggcatccagcgcctgcataaagaaggccatcgccgcgatccacggcaggccagccatgctgcgccctttttttccgctcatgccaaatccttgttattgatttacgtggtgtggggcgttcaacaatgcctggcaggcgagcaacgcccccggcgcatcactgttaagaatggcatcgacaatcgcctggtggagatcgagcttcaccacttcattttgcgtaatcgacgtgaagtaggtgtggtagaccgaatgaaacagcgaggcgaaagagctgaggaaaggattaccgctcatttcatagatatgctcatgccaggccatatcgacttctatccagcgttcgcgctgaaaatggcgtttcagagcaatcatctcttccattaatgtattgagctgcgctttttgcccggcggtgccgttggcggcggcgagaaagcaggcctgtggctccaggctgctgcgcatgacgagaaagtggcttaccacctcttcgaagttatcttctgttagccaccaggagagcagttccttatcaaggaaattccagctgctgcgcggcatcacccgggtgccaatgcgagggcggggcagcagcatgccttttgcagtaagcgtcttcaccgcttcgcggacggcggtacggcttacgccgaactgctcccccaactccatttcgccgggaagaatgctttccggctgatattcgccagtcagtattttttgggcgagcttttcggccagtacccaggaaatgttcttttgtgccgccagttgctgtgcgcttaaagacataaatgccgttcctttctttcctctactctaacagtatgccaccaggcgccccgtttcgtcggttaaaacggcaaaacggcggttttttgcgacattcctcgccgcattgttgaaaaaagagacggttgaaaactttttttgcatttccccttgtcacctcagaattactccctataatgcgcctccactgacacggaacaacggcaaacaagccgccgggtcagcggggttccggtgagaacctcgcagagaaaagcaaaaataaatgcttgactctgcagcgggaaagcgtaatatgcacaccccgcgccgcagcgaaaacgaagcggcactgctctttaacaatttatcagacaatctgtgtgggcactcaaagtgacatggattcttaacgtcctcggacgaaaaatgaataccaagtctcaagagtgaacacgtaattcattacgaagtttaattctttgagcatcaaacttaaattgaagagtttgatcatggctcagattgaacgctggcggcaggcctaacacatgcaagtcgagcggtagcacagagagcttgctctcgggtgacgagcggcggacgggtgagtaatgtctgggaaactgcctgatggagggggataactactggaaacggtagctaataccgcataacgtcgcaagaccaaagtgggggaccttcgggcctcatgccatcagatgtgcccagatgggattagctagtaggtggggtaacggctcacctaggcgacgatccctagctggtctgagaggatgaccagccacactggaactgagacacggtccagactcctacgggaggcagcagtggggaatattgcacaatgggcgcaagcctgatgcagccatgccgcgtgtgtgaagaaggccttcgggttgtaaagcactttcagcggggaggaaggcgttaaggttaataaccttggcgattgacgttacccgcagaagaagcaccggctaactccgtgccagcagccgcggtaatacggagggtgcaagcgttaatcggaattactgggcgtaaagcgcacgcaggcggtctgtcaagtcggatgtgaaatccccgggctcaacctgggaactgcattcgaaactggcaggctagagtcttgtagaggggggtagaattccaggtgtagcggtgaaatgcgtagagatctggaggaataccggtggcgaaggcggccccctggacaaagactgacgctcaggtgcgaaagcgtggggagcaaacaggattagataccctggtagtccacgccgtaaacgatgtcgatttggaggttgtgcccttgaggcgtggcttccggagctaacgcgttaaatcgaccgcctggggagtacggccgcaaggttaaaactcaaatgaattgacgggggcccgcacaagcggtggagcatgtggtttaattcgatgcaacgcgaagaaccttacctggtcttgacatccacagaactttccagagatggattggtgccttcgggaactgtgagacaggtgctgcatggctgtcgtcagctcgtgttgtgaaatgttgggttaagtcccgcaacgagcgcaacccttatcctttgttgccagcggtccggccgggaactcaaaggagactgccagtgataaactggaggaaggtggggatgacgtcaagtcatcatggcccttacgaccagggctacacacgtgctacaatggcatatacaaagagaagcgacctcgcgagagcaagcggacctcataaagtatgtcgtagtccggattggagtctgcaactcgactccatgaagtcggaatcgctagtaatcgtagatcagaatgctacggtgaatacgttcccgggccttgtacacaccgcccgtcacaccatgggagtgggttgcaaaagaagtaggtagcttaaccttcgggagggcgcttaccactttgtgattcatgactggggtgaagtcgtaacaaggtaaccgtaggggaacctgcggttggatcacctccttaccttaaagaacctgcctttgtagtgtccacacagattgtctgatgaacgtaaagaagcaaggcgtcttgcgattgagacttcagtgtccccttcgtctagaggcccaggacaccgccctttcacggcggtaacaggggttcgaatcccctaggggacgccacttgctggttcgtgagtgaaagacgcgtgccgatgtatctcaaaactcatcttcgggtgatgtttgagatatttgctctttaaaaatctggatcaagctgaaaattgaaacgacacacagttaatgtgtgttcgagtctctcaaattttcgcaatcagaagtgaaacatcttcgggttgtgaggttaagcgactaagcgtacacggtggatgccctggcagtcagaggcgatgaaggacgtgctaatctgcgaaaagcgtcggtaaggtgatatgaaccgttataaccggcgatgtccgaatggggaaacccagtgcaattcgttgcactatcgttaactgaatacataggttaacgaggcgaaccgggggaactgaaacatctaagtaccccgaggaaaagaaatcaaccgagattcccccagtagcggcgagcgaacggggagcagcccagagtctgaatcagcttgtgtgttagtggaacggtctggaaagtccgacggtacagggtgatagtcccgtacaccaaaatgcacaggttgtgaactcgaagagtagggcgggacacgtggtatcctgtctgaatatggggggaccatcctccaaggctaaatactcctgactgaccgatagtgaaccagtaccgtgagggaaaggcgaaaagaaccccggcgaggggagtgaaaaagaacctgaaaccgtgtacgtacaagcagtgggagcaccttcgggtgtgactgcgtaccttttgtataatgggtcagcgacttatattctgtagcaaggttaaccgtataggggagccgcagggaaaccgagtcttaactgggcgttaagttgcagggtatagacccgaaacccggtgatctagccatgggcaggttgaaggttgggtaacactaactggaggaccgaaccgactaatgttgaaaaattagcggatgacttgtggctgggggtgaaaggccaatcaaaccgggagatagctggttctccccgaaagctatttaggtagcgcctcgtgnnnnnnnnnnnnnnnnnnnnnnnnnnnnnngctagggggtcatcccgacttaccaacccgatgcaaactacgaataccgaagaatgttatcacgggagacacacggcgggtgctaacgtccgtcgtgaagagggaaacaacccagaccgccagctaaggtcccaaagtcatggttaagtgggaaacgatgtgggaaggcacagacagccaggatgttggcttagaagcagccatcatttaaagaaagcgtaatagctcactggtcgagtcggcctgcgcggaagatgtaacggggctaaaccatgcaccgaagctgcggcagcgacactatgtgttgttgggtaggggagcgttctgtaagcctgcgaaggtgtgctgtgaggcatgctggaggtatcagaagtgcgaatgctgacataagtaacgataaagcgggtgaaaagcccgctcgccggaagaccaagggttcctgtccaacgttaatcggggcagggtgagtcgacccctaaggcgaggccgaaaggcgtagtcgatgggaaacaggttaatattcctgtacttggtgttactgcgannnnnnnnnnnnnnnnnnatgttagccgggcgacggttgtcccggtttaagcatgtaggctggttgtccaggcaaatccggataatcaaggctgaggtgtgatgacgaggcactacggtgctgaagtaacaaatgccctgcttccaggaaaagcctctaagcatcaggtaacattaaatcgtaccccaaaccgacacaggtggtcaggtagagaataccaaggcgcttgagagaactcgggtgaaggaactaggcaaaatggtgccgtaacttcgggagaaggcacgctggtgtgtaggtgaagtccctgcggatggagctgagaccagtcgaagataccagctggctgcaactgtttattaaaaacacagcactgtgcaaacacgaaagtggacgtatacggtgtgacgcctgcccggtgccggaaggttaattgatggggttatccgtaaggagaagctcttgatcgaagccccggtaaacggcggccgtaactataacggtcctaaggtagcgaaattccttgtcgggtaagttccgacctgcacgaatggcgtaatgatggccaggctgtctccacccgagactcagtgaaattgaactcgctgtgaagatgcagtgtacccgcggcaagacggaaagaccccgtgaacctttactatagcttgacactgaacattgagccttgatgtgtaggataggtgggaggctttgaagcgtggacgccagtctgcgtggagccaaccttgaaataccaccctttaatgtttgatgttctaacgttggcccctgaccggggttgcggacagtgtctggtgggtagtttgactggggcggtctcctcccaaagcgtaacggaggagcacgaaggttagctaatcctggtcggacatcaggaggttagtgcaatggcataagctagcttgactgcgagcgtgacggcgcgagcaggtgcgaaagcaggtcatagtgatccggtggttctgaatggaagggccatcgctcaacggataaaaggtactccggggataacaggctgataccgcccaagagttcatatcgacggcggtgtttggcacctcgatgtcggctcatcacatcctggggctgaagtaggtcccaagggtatggctgttcgccatttaaagtggtacgcgagctgggtttagaacgtcgtgagacagttcggtccctatctgccgtgggcgctggagaattgaggggggctgctcctagtacgagaggaccggagtggacgcatcactggtgttcgggttgtcatgccaatggcactgcccggtagctaaatgcggaagagataagtgctgaaagcatctaagcacgaaacttgccccgagatgagttctccctgagactttaagtctcctgaaggaacgttgaagacgacgacgttgataggccgggtgtgtaagcgcagcgatgcgttgagctaaccggtactaatgaaccgtgaggcttaaccttacaacgccgaagatgttttggcggatttgagagaattttcagcttagattcagagttgagtacgcaatataaagaattgcgtactgagcacaaagaatttgcctggcggcactagcgcggtggtcccacctgaccccatgccgaactcagaagtgaaacgccgtagcgccgatggtagtgtggggtctccccatgtgagagtagggaactgccaggcatcaaataaagcagaaagcccggtcgaaagaccgggctttttgttttatctgttgtttgtcggtgagcgctctccagagtaggacaaatccgccgggagcggatttgaacgttgcgcagcaacggcccggagggtggcgggcaggacgcccgccataaactgccaggcatcaaacaagtgaagagcccatcctgccggatgggctttttgcgtttctggcgtccggccagcgtgccggcatgcctccccggtggcgctgcgcttaccggggctacggatccgacacggggctacgtccctgtggccggacaaggtgcgcagcaccgcctccgggaaaatccctcctatatcaccgtcgataaatgactattgcctctctaaccaactcacaataaatgtcgcgatctgtggtacattatttaaatccagcagcggaagtgaggtcgcgatcgatacatcgctggccacggcgatggtatgctcatcaattaccagctcttctacacgatggccgctgttttgccgaaaaagcaggatcttcggcacgggttcatgtttgaacccctccactaaaaccaggtccagtttgctggcatccattcgactgaccagccacgtgagatctaattccggcttctctggcgtctcggtcatcaatgcccaccgctgttcgctggcgacaatagtttgcgcagcgcccgccttacgcagttcatagctatctttgcccggcttatccacgtccatatcatgatgggtgtgctttatcagtcccgggcgtaatcctagagcgcaaagctcagggataagacgctttaataatgttgtttttccggtaccgctccatgcggcgatcgccagtaatgggatcatgatggctcctgcatctgctgcaaatcttcgagcgtatttacattaatgaaagcagttttcacatcgctgaaattcaccgggcgcccacccatttgtcgcataaaaaccatcaccctgcgctctccatgtgccagataagcctccagttccggaatgatttgacgatgaactaatgcaacggcaggatgatcccgttcgccgtcatgggcccaaacgaccggtgcgtcccctctctgctggataaagcgctccaccaaaaaggacggaatgaacggcgtgtcgcaggggcaaaaaacaaaccatgggctcgcgacctgctgcatcacagcaagcattccggccagcggcccctgataaccctcctgtatgtctcgaaagaccggatatccgctggcacgccactgttcaagatgacgattggcgctaatgactaactcatctacctgcggggctaatgcttccgcgacgtgtcgccagagagggcgaccatttagcgcctgtaatcctttatcaatgccgcccatccgcgtggccctgccgcccgccagcacgacgccggttatcgcctcgctttgcatatgaatatcgcctctttcattgtgggattgaccctgttaacttgtccctatcaagagtaaggagcatgaccatgaaatgtaaacgtctgaatgaagtaattgaactcctccagccagcctggcaaaaagagcctgaactgaacctgatgcaatttttgcagaagctggcgaaagaggccggctatgatggcgaactgagcgatctttccgacgatattctgatctatcacctgaagatgcgcgactcttccaaagatgctgtcatcccgggtattcagaaggattatgaagaggactttaaaaccgcgctgctgcgcgcccgcggggtaataaaagagtaaaaggttgtaagcgctaccgcgtaaagtgcaatgagatgatatcctgaactattcgtacgattatcggatgtcaggatgcacgataaggcttttacttttcagacgcttcgcccggataccattatcgatgggttattcgatctgggtatgcgggtggactccggtctcaccccgctaaacagctatgagaaccgcgtttatcagttccaggacgaagagcgccatcgctatgtggtaaagttctatcgtcctgagcgctggtccgcagaacagatccttgaagaacaccagtttgcgcttcagcttgtagaagatgaagtgcccgttgctgcgccgctcttatttaatgacagcacgcttcatcagcatcagggattctactttgccgttttcccaagccttggcggtcgtcagttcgaagcggataaccttgatcagatggaatgggttggccgctacctggggcgcctgcaccagactggccgcaaacagcgctttactgcccgcccggaaattggcgtgcaggagtacctgctggaaccgcgtcaggtgtttgagcaggcgacgctgatcccctctggcctgaaggccgatttcctgaaggcgaccgataaactcattgctgccgtcatggagcaatggcacggccgcgggaacacgttgcgcctgcacggtgactgccatgccggtaatatcctctggcgcgacggaccactgtttgtcgacttagacgatgcgcgtaccggcccggcgattcaggatctgtggatgctgctcaacggcgataaggctgaacagcgtatgcagctggagactattgtcgaggcctatgaggaattcagcccctttaacagcgatgaaatcgcgctgattgaacctttacgcgctatgcgactggtttattatctggcgtggttgctcagacgctgggacgatcccgctttcccggtcaatttcccctggttaaccggggaggattactggtgggggcagacgtcgacttttcttgagcaggtgaaggttctacaggaacccccgcttcagttaacgccaatgtattaatgtgatatatccaggagagagtaaatcatgaaaaaagtttggctggcgctggctggtatgattctggcttttagtgcatccgctgcccagatcaccgacggcaagcagtacatcacccttgataagccgattgctggcgagccgcaggtgctcgagttcttttcgttctactgcccgcactgctaccagtttgaagaagtgctgcatgtctctgacaatgtgcgccagaaactgccggaaggcactaaaatgaccaaataccacgttgagttcctgggtccgctgggcaaggatctgacgcaggcatgggcggtggccatcgcgctgggcgttgaagacaaaattactgcgccgatgttcgaagccgtgcagaaaaaccagactgtgcagagtgtggctgacattcgtaaagtgtttgtcgacgctggcgtgaaaggggaagactacgatgccgcatggaatagcttcgtggtgaaatctctggtcgctcagcaagagaaagcggcagccgatctgcagctgcagggcgtaccggctatgtatgttaatggtaaataccagctgaatccgcaggggatggacaccagcaatatggatgtcttcgtcgctcagtatgcggataccgtgaagcaactggtagagaagaaataaaaaaaacgccggtcactgaccggcgttactttatctgttttgcaatagctaccgttctttgtccctcatgatgtcagtcaactgacggtctttctcttcccataggccattcagccagcgctggaagccgcgcttaaagttcttatcgttaacgtaatcgccgtgcagctcttcgccaatagggaccagattgatacggaccacaatgcgcgtcaggcggccgcttaacatatcgtaaaatggtcttgtatgattatccgggtagcacagcgtgacgttcagcagtttatcgaactgcgaaccgagtacgttgagcgccatggcgataccagcggctttcggcggtaacaggttgtggtaaggagagcgcgtttcgcgctttttttcttcggtaaaacgtgagccttccacaaaattgacgatagtcgtcggatgcgcgcgaaatttttcacacgaacggcgggtggtttcgacatctttaccgcggcgctccgggtgacgaataagatagctgcgcgagtagcggcgcataaaaggcatatccagcgcccagcaggcgaggccaatgaagggtacccacgccagctgttgtttaaggaagtacttattcatcggaatatgcttgcggaacagcacgcacagcaccacgatgtctgcccagctgtggtggttgctgatcagcagataccagttctttttgttcaggccttccagaccctggacgtcccattttagccagggattgagatgcaacagcagcgccagcccttcgcaccagcagtacatcataaaattgcaaaaaacggatatagagcgccataccgctggaatggggaccagcagtttaatcagcccggcgacgatgatcggtacagagcagataatggtgactaagatggttaaggcgatactcagcggaagtgttatcgcagcgagtaatctcgacatagttagtttattcagaaagttaggctgacaaagagcgcctttaagctgcgcaagaggctgattttaccagaaaacgcggcaaatgacgggtcttaccagaacagaaaaaaacaaggatcttctatccacatggaagattaggtcatcaaattaatgccaggatcgttgatctgtttttaagtggttgataaatagtaaataatactatttattcatttattttcaggggcggataagctgacgttgtaaaactatgcacaaagttatccacaagctaagttgtcgcgcgatcgcgacgatcgttgaatcttttccgcgaattgcgggaaaaattcaggatttcatgcccgtctgtggcatcctttatccataatctgataaacaggcacggaaattatggttcagatcccagaaaaccctctcatcctcgttgacggctcctcctatctttatcgggcgtatcatgcgtttccgccgctgactaacagcgcaggggagcccaccggggctatgtacggcgtactgaatatgctgcgcagtttgatactgcagtatcaaccgactcatgccgtcgtggtctttgatgcgaaagggaaaaccttccgtgatgaattgttcgagcattacaaatctcaccgcccgccgatgccggacgatctgcgcgcgcagattgagccgttgcataagatggtgaaagcgatggggctgccgctgatggctgtcccgggcgtcgaagctgacgatgtgattggcaccctggcgcgggaagcggaaagggcaggtcgcccagtcctgatcagcaccggcgataaagacatggcccagctggtgacgccgggcatcaccctgatcaataccatgaccaacactatcctcggaccggatgaggtggttactaagtacggcgtcccgccggagctgattattgatttcctggcgctgatgggcgactcctcggataacattcccggcgtgccgggcgtgggcgaaaagaccgcccaggcgctgctgcaaggcctcggcggccttgatacgctgtatgcggaaccggagaagatcgctgaactgagcttccgcggcgcgaaaacgatggcggcgaagctcgagcagaacaaggacgtggcttatctctcttatcagctggcgaccatcaaaaccgacgtcgagctggagctcacctgcgaagagctggaggtgcagccgccggcggcagacgatctgctggcgctgttcagacagtatgaatttaagcgctggaccaccgacgttgaggccggaaaatggctgcaggctaaggggggcaaaccggctgcgaaacctgcagtgcctgcagcagcggcagaagcggaagaagaggttgaagccgctactgcactttcagcagagcattatgtcactatccttgatgaggctacgctgctcacctggatcgataagctgaagcaggcgccgctctttgcctttgatacggaaaccgacagcctggataacatctccgccaacatggttggtctttcattcgctgttgagccgggcgtggccgcctatgtcccggtagcgcatgattaccttgatgcgccggatcagatcccgcgcgagcgcgtgctgacgctgcttaaaccgctgctggaggatgagaaggtgctcaaggtcgggcaaaatctcaaatacgatcgcggcattttggctaattacgacattgagctgcgcgggattgcgttcgataccatgctcgagtcttacattctcgacagcgtggcgggccgccacgatatggacagtctttccgaccgctggctgaaacataaaaccattaccttcgaagagatcgctggcaagggtaagaatcagctcacctttaaccagattgcgctggaagaggctggtcgctacgcggcggaagatgccgacgttacgctccagctgcatctgaagatgtggccgaagctacagcagcatgaaggcccgctgaatatcttccagcacattgaaatgccgctggtgccggtgctgtctcgcgttgagcgcaacggcgttaaaatcgaccccgccgtgctgcatgcgcactcgcaggaaattgcccagcgtctggttgagctggagcagcgggcacatgagatcgccggggaagcgtttaatctctcctccaccaaacagctgcaaacgatcctgtttgaaaaacagggtatcaagccgctgaagaagacgccgggcggtgcgccgtccacctctgaagaggtgctggaagagctggcgctcgattatccgttgccgaaagtgattctggagtatcgtgggctggcgaagctgaagtcgacctataccgataagctgccgctgatgattaaccccaaaacgggccgcgtgcatacctcctatcatcaggcggtcaccgccaccggccgtttgtcgtctaccgatccaaacctgcaaaacattccggtgcgtaacgaagaagggcgccgtattcgccaggcgtttatcgcgccggaagattacgtcattgtctcggcggactactcgcaaatcgagctgcgcattatggcgcacctgtcgcgggataaaggcctgctgaccgccttcgcggaagggaaggatattcaccgggcgacggcggctgaagtatttggcttaccgctggacagcgtcagcagcgaacagcggcgcagtgcgaaagccatcaacttcggtctgatctacggcatgagcgcctttggcctggcccgccagctgaacatcccgcgtaaagaagcgcagaagtacatggatctttatttcgaacgttatccgggcgtcctggagtatatggagcgcacccgcgcacaggcgaaggagcaagggtatgttgaaacgctggatggccgtcgactctatttgccggatatcaagtccagcaatggcgctcgtcgtgccggcgcggagcgtgcggcgattaacgccccgatgcaggggacggctgcggatattatcaagcgggcgatgattgccgttgatgaatggctgcggagcgagaaacctcgcgtgcggatgatcatgcaggttcacgatgaactggtctttgaagtgcataaggatgagctcgatgccgtatcgaaaaagatccacgaactgatggagaacagcactacgctggcggtaccgttgctggtggaagtgggcagcggcgaaaactgggatcaagcgcactaagtatacaaagcgcaacgcgattttctgtaagtaagcaacataacttatagagttttgtgaggatcatttgaatttgctatgtaaatagtgaaaaaaaactacaaaaaatgctttatccgtgagcgaaagaagagtaaagttattcgcgtagggtacagaggtaagatgttctatctttcagaccttttacttcacgtaatcggatttggctgaatattttagccgccccggtcatttatgaccggggcgttttttattgcgcgaaagaaaagttttacgctgtgaaaacaacgtagtatgaacgtccggatagggcgctacgcgccgttatccggaaaaagcgggggttactcggcgtcttcgacggcttcttgcggcgggatttcgttaaaccagctatccagcttctgtcgcagcttatcgacgccagattttttcagcgaagagaagggttcaacctggacatcgccattgaaggccagtaccgcttcacgcaccatattcacttgcgctttacgcgcgccgctggcgagcttatcggctttggtgagcagtaccagcacctgaatatcgctctctaccgcccattcgatcatctgttgatcgagatctttaagcggatgacgtatgtccatcagcaccacgagacccttcaggcacagacgtttttccaggtattcccccagcgcgcgctgccacttgatcttcatctcttcgggtacttgcgcataaccatagccgggcaggtcgacaaggcgcttgccctcagcgacttcgaacaggttaatcagctgcgtacgccccggggttttggaggtacgcgccaggttcttctgattagtcagcgtattcagcgcgctggattttcccgcgttggagcggccggcgaacgccacttcaataccggtatcggcaggaagatggcggatatctggcgcgctagtgacaaagtgcgtcagttgataattccagttggtcaagacggtcgtctccgttaaaacaggctatggcagggattatacctgaacagcagaaaaaggctgtttttaccgcacgccgttcctgtaagtaaaaaccatatggtttgtgagacattgactattctttgtataggacatacctgaggaaaataagacaaaacatatttaaaatattgaaaattaatcaattatagaaatagagaattctgaaaatagatttttaactgccagactggttgtcgatttttgtcaacaaggtaaagtaatacacaacggcggggatgctgaaaggattaggactcaggacgaggagtcaggaagcgccaggaggcgaagaccacaggatagtcaggatgacgcgcgtcttggagacgttttacagggaaaaggaagaaacagggaccgttggacgctaagggaaagacagggtgagtcgttagcgaacagggaaagaagagcccgttaagggtggtcagtgaggaaaaaggcgacagagtaatctgtcgccttttttctttgcttgctttctgctagattccgcctcaattctatactgaatactactgtctgaagattacacatcatgaaaaaaccgacatccgccacccgtggcaaatccggccgcaagtcgcgtgaagagttaaatcaggaagctcgcgatcgcaaacggcagaagaaacatcgtggccacgcggcaggcagtcgcgcgaacggcggcgatgcggcttcagcgggtaaaaaacagcgtcaggcgcaagatccgcgcgtgggtagcaaaaaaccgatcccgctgggcgtgagcgaaagccgcgctccagcccccaagcagcataaaccaaagagcgagaaacctatgctttcaccgcaggctgagctggagttgctggagaatgatgagcgcctggacgcgctgctggaacgtctggaagagggcggcacccttaatgctgaagagcagagctgggtggacgccaaactggatcgcattgatgagctgatgcagcagctcggcctctcttacgatgatgaagatgaagaagaggaagagcgtcaggaagatatgatgcgtctgctgaagggtggaaactaacatttgcatcccatcggattcccggtactccttataacccttctggttatatgttatctgctgtggttattcgttaaactacgacggttgtcgcggcgtcagaaatggctgcgcaaccggctcatgacccgcggtgcggtggggccgggacggcgtacccgtcggcggcaccatcggaaggagtgagcatgtctgagcagataatcgactgggatctggccctgatccagaaatataactattccgggccgcgctatacctcgtatcccaccgcgctggagttttcaccgcaatttggcgcggcggaattcgatgccgctgtggcccgttacccacagcggcccctgtcgctgtacgtgcatatcccgttttgccataagctgtgttatttctgcggctgcaataagatagtcacccgccagcagcataaggccgatcaatatctcgatgtccttgaacaggagatcatccaccgcgcgccgctgtttgccactcgccaggtgaagcaactgcactgggggggcggcacgccaacttatctcaataaggcgcaaatcagtcgcctgatggatctattgcgcagccatttccatttcagcgcggaagccgagatctccatagaggtcgatccgcgtgagatcgaactggatgtcctcgatcatttacgcgctgagggtttcaaccgcctgagtatgggcgtacaggacttcaataaagaggttcagcgtctggttaaccgtgagcaggacgaagcgttcatctttgatttgctcaaccatgcgcgggagattggttttacctcgaccaatatcgacctcatttatggcctgccgaagcaaacgccggagagcttcgcctttaccctgcaaaaggtcgccgagctcaatcctgaccgcctgagcgtgtttaactatgcgcatctgcccacgctctttgccgctcagcggaagattaaagatgccgatctgccctccgctgagcagaagctggagatcctgcaggaaaccatcggctcgctgacgacggcaggctatcagtttatcggcatggaccatttcgcccgtcccgatgatgaattagcggtcgcgcaacgtcacggcgtactgcatcgtaatttccagggctacaccactcagggcgataccgatctgctggggatgggcgtttcggcgatcagcatgattggcgacagctacgcccagaaccaaaaagagctcaagcagtactaccagcaggtagcagagcaagggaacgccctgtggcgcgggatcgcgttaactcgcgatgactgtctgcgtcgcgacgtgattaaagcgttgatctgtaacttccagctggatatcgcggcggtcgaggcgcagtgggacgtggattttgcgtcttatttcgccgaggatctgaagctgctggcgccgctggcgcatgacgggctggtggctgtggatgataaggtcattcaggtgacggcgaaaggccgcctgctgatccgcaacatctgtatgtgctttgatgcctacctacggcaaaaggcccgaatgcagcagttctcacgggttatttaatgttttccccctctcccgcaggagagggggaacaattagctgaacagcccgaccagcgcagcgcacagcaaggcagcgactgccgtttgtggcgtgtgactcgcagcggcgccgctcgatatcatactcaccagtgattcaaacatgatgctctcccctaatgccggggacgatcatactcaactcatcggaacagtaaagtacaaaatagcagcactttgcgccgatcggctatttttcatcatgctgttgtaccctactccatacccaattcttttagcttacgcgtcagggtattacgtccccatcccagcaggcgcgcagcctcctgcttgtgcccctgagtatggcgcagggcggtcgttagaagcgtgcgctccatttcgggttgcgcttctgagagcaggttttgatgaccggatcgcaacgcccgatcggcccactgacccagcagcgtagcccagctgtcaggctgcatctgcgttgggctatcaggaatcgtggtctcaaacagttcgctcggcagatcctgcgtcagcacctcctggccggcggccatgacggtgagccagcgacaggtgttttccagctgacggacgttgcctggccacgccaggcgggtcagcgctgtctccgtttccggatgcagctgtttggcttcaacgccgagctcgcgggcggctatctgcaggaaatggcgggccaggcgtggaatatcttcccggcgctcgcgcagcggcggtaaatgcacccggatgacgttcaggcggtggaacaaatcttcacgaaatttcccctcctgcacgcgctgttccaggttctggtgggtagcggcgatgatccgcacatcgaccttgaccggcgcgtaaccgcccacgcgataaaactgaccatccgccagcacgcgcagcagacgagtctggacatcaagcggcatatcgccaatttcatccaggaacagcgtaccgccgtcagcctgttcaaagcgaccctgacggacggtattggcgccggtaaaggctcctttttcatggccgaacagctcggactcaatcaggtccttggggatcgccgccatattcagcgcgataaacggcgcttttgagcgtggactatggcgatgcagggcatgtgcgacaagttctttaccggtaccggattcgccattgatcagcacgctgatggatgagcgcgacaggcggccaataatgcgaaagacatcctgcatagctggcgcttcgccgatgatgtcggcggttgggctacttatcggcgcatttcgcggctgctgctgctcttgatagtggcttatcgcccggtcgacgagggcgacggcttcatcgatatcaaaaggtttgggcaaataatcaaacgcgccctgctgataagcgctgaccgcggcgtccagatcggaatgcgcggtcattatgatgaccggaagcattggatggcgctgcttaatctgtttgagcagcgccagaccatccattcccggcatacggatatctgacagcagtacatccggggttttggtggtgagggcatctagcacctcattgccgctttcgaacgttgtgcagctcaagccggctccggtgagcgcgcgttcaagcacccagcggatggagctatcgtcatcaacgatccaggctatccctcgttgcataaacacctctacttccgaataggcaggtataccgaaaattcggtatgacccggccagctggtgaattcaattttgccggagtgctgatcgataaggctacgggcgatagataagcccaggccggtaccgccttcgcggccgctgaccatcggatagaacagcgtatcctggagatggggcggaatacccgggccattatcttcaacgtcgatgcgggcggcgaggcgataacgcaccccgtgcagcgtcagctggaaagcggtgcgggtgcgaagaataatttcgcccccttccggccccagcgcctgcagcgcattacggacgatgttcagcaacacctgttcaatttgatccgggtcgtggggtagctctggtaggctggggtcgtaatcgcggatcaacttcacgttgtccggcaactccatggaaaccagtttaactacccgttcggcgactttgtggatgctttcggtaacgtgcatgcccggatgctgtggtccgagcaggcggtcgaccagatttcttagccggtcggcctgctcaatgatcactttggtatattccgttagcgccggatcgggcagcgctttgctgagcagctgggccgcgccgcgcaggccgcctaacgggttttttatctcatgcgccaggccgcggacgaggtcgcgagcggcgacctgctgcgcatgctgcagctgctcctggctcaggcggcgctgattatccatcggcgccatttccagcagaataaagccttccggcagccgctgggcggtcaacgacaggatgtgcgaacggccatcgataaccaacgtcacttcgttatcggtaaacccctggcccgcctgcagactctcctgcatcagcccgatattcaacgaaaaatagctcaacagttcaggtaatggggtgccaaacagtttgcgcgagctctgcgccagcagctgctgcgccgcagggttggcaaagtgcaccgccaggtcatcatcgaccagtaaaatactgttgataagggagttaaggatctgcccagcatcgggcagtgtgcctgttgccattcgacagtctcctgaaaatgagtgcaccaatttagtgcagtatagctttttatcggtaaaaagctcgcgagatcagcgtgttggtggagaaaaaagcccatcctgagatgggctgaaagtttccacggcaacaaaatatcccgggcatctcgcgccacaacacgacataccctggatttacagcaaaattagacgctgtagtacagttcgaactcaaccggatgcggagtcatgcgtacgcggtcgttctcttccatacgcagggcgatgtaggcatcgatagcgtcattggtgaacacgccgccagcggtcaggaactcgcgatcagcatccagggcctgcagggcttcttccagagaaccggcaacctgcgggatctctttcgcttcttccggcggcaggtcatacaggtttttatccattgcttcgcccggatggattttgttcttgataccatcaaggccagccatcagcagcgccgcaaagcacaggtacgggttggcagccgggtccgggaagcgcacttcgatacgacgcgctttcggagaggtcaccaccggaatacggatagaggcagagcggttacgggcagagtaagccagcataaccggcgcttcgtaacccgggaccagacgcttgtaggagttggtggtcgggttcgccagggcgttgatggctttagcgtgtttgattacgccgccgatgtagaacagcgcctgctcagacagacctgcgtatttgtcgccggagaacaggttggtaccgtttttcgccagagacatatggcagtgcatgccggagccgttgtcgccgaacatcggtttcggcataaaggtcgcggttttaccaaagcggtgagcgacgttgtgaacaacgtatttgtaaatctgaatttcatccgcttttttggtcatggtattgaagcgggttgccacttcgttctgacctgcggttgctacttcatggtgatgggcttcaacaaccagacccatctcttccatgatcatacacatggtggaacggatgtcctgagaagagtctactggcggaaccgggaagtaaccccctttcacgcccggacggtgacctttgttaccgccttcgtatttggtagaggagttccacgcaccttcaatgtcatcgatcgcgacatgggagccggagatagaggcgccaaagcggatgtcgtcgaacaggaagaattctggttctggcccgaacaggacggtatcagcgatgccggtggcgcgcaggtactcttcagcgcgtttcgcgatggagcgcgggtcacggtcatagccctgcagggtgcctggctcgaggatatcgcagcggatgatcagggtcggttcttcgtagaacgggtcaatgaccgcggtggacgcgtccggcatcaggaccatgtcagattcgttgatacctttccagccaccaatcgaggagccatcaaacattttgccttcttcgaagaattcggcatttacctgatgagacggaatcgtgacgtgctgttctttacctttggtatcggtgaagcgcagatcgacaaacttcacttcgtgctcgttcagcatcgtcaaaacgtgttcagcggacatacttaaactctcccggattggtcattgtcgtcgtggtaacgaaaacttcatactgcttaaaagtggcgttgttgccttaaaaaatataaagcgaaatctgtgccaacttttaaatgccccataaaacgctgtatcatgcgcaccatagtgcaaaaggactgcaccatgatggagataatgcaccaaaatagtgcttcagtgtgaacattgagcaccattttggtgcaatttttgttacggtgcccttttatcgctccgtgaaagcggtcacaaagaaactctgcaatacttgtttgcggaggatgtttgtgatcctgttcagtccttcgcttaatacgtgtacaataacgcgctatttctaatgcctgaggcaaagttgtgatcgaaaatctgcgtaatatcgccatcatcgcgcacgttgaccatggtaaaactaccctggttgacaagctgctacagcaatccggtacgttcgacgcacgtactgaagcacaagaacgtgtgatggactccaacgatttggagaaagagcgtgggattaccatcctcgcgaaaaacaccgcaatcaaatggaatgattaccgtatcaacatcgttgataccccagggcacgccgacttcggaggtgaagttgagcgtgttatgtccatggttgactctgtgctgctggtggtagatgcctttgatggcccgatgccgcaaacgcgcttcgtgaccaaaaaagcttttgcccacggtctgaagccgatcgtggtcatcaacaaagttgaccgcccgggcgcgcgtccggactgggttgtcgatcaggtgttcgacctgttcgttaacctcgatgcgaccgacgaacagctggacttcccgatcgtttacgcgtccgcgctgaacggtatcgcgggtctggatcacgaagacatggctgacgacatgaccccgctgtaccaggcgattgtcgatcgcgtgccggcgccggacgttgatcttgacggtccgctgcagatgcagatctcccagctggactacaacaactacgttggtgttatcggcatcggccgcatcaagcgcggtaaagtgaagccgaaccagcaggtcactatcatcgatagcgaaggcaaaacccgtaacggtaaagtcggtaaggtactgactcacttgggtctggagcgaattgagagcgacgtagctgaagctggcgacatcatcgcgatcaccggtctgggcgagctgaacatctccgacaccatctgcgacccgcagaatgtcgaagcgctgccggccctgtccgttgatgagccgaccgtttccatgttcttcaacgtcaacacctctccgttctgcggtaaagaaggtaagttcgttacctctcgccagatcctggaccgtctgaataaagagctggtgcacaacgtggcgctgcgcgttgaagaaaccgaagacgctgatgcgttccgcgtttccggccgtggtgaactgcacctgtccgttctgattgaaaacatgcgtcgtgaaggtttcgagatggcggtttcccgtccgaaagttatcttccgcgaaatcgacggccgtaaacaagagccgttcgagaacgtgacgctggacgtcgaagagcagcatcagggttctgtcatgcaggcgctgggcgagcgtaaaggcgacctgaaaaacatgaatccggacggtaaaggccgcgtacgtctcgactacgtaatcccaagccgcggtctgatcggcttccgttcagagttcatgaccatgacctccggtaccggtctgctgtactccaccttcagccactacgacgacgttcgtccgggcgaagtgggccagcgtaacaacggtgtactgatctccaacggtcagggtaaagcggtagcgttcgcgctgttcggtctgcaggatcgcggtaagctgttcctcggccacggcgctgaagtttacgaaggccagatcatcggtattcacagccgttccaacgacctgacggtaaactgcctgaccggtaagaaactgaccaacatgcgtgcgtctggtactgacgaagccacggttctggttccgccggttaagatgaccctggagcaggctctggagttcatcgatgacgacgaactggtagaagttactccgacctctatccgtatccgtaaacgtcacctgaccgagaacgaccgtaaacgcgcgatgcgcggtgcaaaagaagagtaattttttcttcttgttgttcgctaaaccccgcctctccggcggggtttctttttttcattcctgcatcacacgccaatagtcaaatccagcctttcccgctaaagttaattttccacggcgcggaaggagacaaaaatgctctatatctttgatttaggtaatgtgattgtcgacattgacttcaaccgggtattgggagcctggagcgatttaacccgcatcccgctggcgacgctgaagcagcatttcaccattggtgaggctttccatcagcatgagcgcggcgagctcagcgatgaagactttgccgccgccatgtgccatgaaatgaatatgcccctcagctatgaacagtttgctcacggctggcaggcggtgtttgtcgcgctgcgcccggaggtgattaccatcatgcataaacttcgtgcccaggggcatcgggtggtggtgctctccaataccaatcgtctgcacaccacgttctggcccgatgaatacccggaagtgcgcgcggccgccgatcgcatttatctgtcgcaggagatgggattgcgtaagcctgaagcgcaaatttatctgcgagtactggaagaagaggggttttccgccgcagatacggtcttttttgatgataacgtcgataatatagcaggggccaaccggttggggatcaccagtatcctggtgactggtaaggagaccatccctgactatttcgcgaaacagctatgctaaaaaccgttcatcaaaaattactccaccatacccggccgctgctggcgtggctaaagctgctgtggcggcgcattgatgaagaccatatgaccaccctggcggggaacctcgcctatgtgtcattactgtccctggtgccgctgattgccgtcgtgttcgcgctgtttgcggcctttcctatgttctccgaagtcagcgtgcagatccgtcattttatcttcgccaattttattccggcgaccggggatgtaatccagggatatatcgagcagttcgtggccaactccagccgcatgaccgccgtaggcgcctttggcctgatcgtcacctcgctgctgctgatgtactcgatcgacagcgcgctaaacaccatctggcgcagcacgcgcagccgccccaaagtttattcctttgccgtttactggatgatcctgaccctcggcccgctgctggcgggcgccagcctggcgatcagttcctatctgctgtcgctgcgctgggcaagcgacctggacggcgtaattgataatctgctccgcctatttccgctgatcctctcctgggcagcgttctggctgctctatagtattgtaccgactacccaggtacgtaaccgcgacgcggtgatcggggcgctggtggcggcgctgctgtttgaggcaggtaaaaaggcgtttgccctctatatcaccacctttccgtcctatcagctaatttatggcgtgatttcggtggtgccgattttgttcgtctgggtgtactggacctggtgtatcgtcttgcttggcgctgaaattactgtcactctcggtgaataccgcaaacttaaaacagaagaaacagaacaaccatgattgcattaattcaacgcgtatcccgtgcaagcgttaccgtggcggacgaggtgacgggcgaaattggcccggggcttctggtgctgctgggcgtcgagaaagacgatgatgaacaaaaggcgaatcgcctttgtgaacgcgtgctgggctaccgcatcttcagcgatgcggaagggaaaatgaacctgaatgtccagcaggcgggcggcagcgtgctggtggtttcgcaatttacgctggcggccgataccgagcgggggatgcgaccgagcttctcgaaaggcgctgcccctgaccgcgctgaggcgctgtatgagtatttcgtcgcccgctgtcgccagcaggaaatgcacacccagaccggaagattcgctgcggatatgcaggtttctttggtcaatgatggtcccgtgaccttttggttgcaggtatgacccagcttccgggcaggctgcgggtaacaaaagagagtacgactatgtatcaccttcgtgtaccgcaaacagcagaagagttagagagctactaccagttccgctgggagatgctgcgtaagccgctgcatcagcctaagggatcggaacgtgacgcctgggatgcgatggcgcatcatcagatggtagtggatgaagagggcaacctggttgccgtcggccggctatatatcaatgcggagaatgaagcctccatccgctttatggctgtgcatccctcggtgcaggataaagggctgggtacgctgatggcgatgaccctggagtccgtcgcgcgtcaggaaggggttaagcgggttacctgcagcgcgcgcgaagatgcggtggaatttttcgccaagctcggatttgtcaatcagggtgagatcaccaccccgaccaccacgccgatccgtcattttctgatgatcaaaccggtcgcgtcgctggacgatattttgcaccgcggcgactggtgcgcacagctccagcaggcgtggtatcagcatattccgctgagtgaaaaaatgggcgtacgtattcagcagtacaccgggcagaaatttattaccaccatgccggaggcggggaaccagaatccgcaccatacgctgttcgccggcagcctgttttcgctcgctaccttaaccggatgggggcttatctggctgatgctgcgcgagcggcacctgggaggcaccattattctggcggatgcgcatatccgctacagccagcctattagcggccgccccagcgccatcgccgacctcggttctctgagcggcgatctcgaccgactggcgcgcgggcgtaaagcccgcgtgcaaatgcaggtggagctttttggcgacgataaacagggcgccgttttcgaggggatctacatcgtgctgccggcgaagccctttggctcgtacgaagagggcggcaacgaggaagagtaagcgcctgcggcagttatcgtcctggcgatgccacacgccaggcgatatcccgcatggcatcacgcgcggcgttgctgacgcctcccagctgaaagaagccgtggatcacccccagatagcgctgacaggaactctccaccccttgctccgtcagccttcggtacagcacttcgccctcatcacgtaaaggatcgaactccgccgtcaggatgtggaccggtggcagaccgtgaaaatcttcgcgccacagcggactggcatccggatgggtagcgggtgtggccgctaaatacatttcgtagccgctaagcagcgtgtcccgggtaatgatgtaatcctcgccgttgctggcgtagcttgccatgctggcggtagcgtcgagcatcgggtaaatcaggataagctgtgcaggctgccatgttcccgccgctttcaggcgcagagccgtgaccagggcgagatgcccgccggcgctgtcgccggccagggtgatgcgcgaagcatccacgccaagctgttttgcgtgctggtgaataatcgtggcacctcgttctgcatcatcgtgcgccgccggaaaagggtactccggggccagacgatactgcacggcgatcacccggcacccactgaaccaggcaagctggcgcaattgattgtcatgggtggcaaagccgccgctgacaaaacagccgccgtggtagtagataagcgtgggtagcaggccgtcggcagtgggcggtgaaacgacgcggaagtgcataccctccagggtgatatcctccacccgcactcgcgtttccgtctccccggcgagtaccgcactggcgatatagccggccctccgatcatcaatatgctgatcgcgtgatgaaggacgacctgccgcaataaatgcctcaaccagcgaagcaatccctttttccagcgccatatgaagttccttatactgttttaatatccagtgttatagcctggattatggcgaaaagacaggcctgttgaggtcgcctgtgcattatggaaagcggctcgcaaaaaagagtttacctgacaaaatcctgtttgtttccgattccaaaagctctagattgctcataacttcatcactggtgatatacttgaggtatatatgagcatgatggctgaaagggatatgggcagaattcttctcgatttatcagacgatgtcattcaacgtctcgatgacctcaaagtgcagcgtaacattccgcgagcggaactgttacgtgaagcggttgaacaatatctggagaaacaagatcgagctaaagataccatctccagtgcgctgggtctgtggcaagactgcgaagaagacggcatggaatatcaacgtcagctacgcaaggagtggtaatgacctccggatctgcgctttttgataccaatattcttattgatttatttagcgggcgtcgcgaagccaaacaggcgctggaggcctggccaccgcagaatgcgatcagtctgattacctggatggaggtgatggttggcgctaaaaaatatcaccaggagcagcgcacgcgaatggcgctgagcacctttaatatcattaacatctcacaggatattgcagagcgaagcgttgcgctgcggcaggagtataagcttaagctgccggatgccatcattctggcgacggcgcaactccatcgtctggaactaattacgcggaatacgaaggattttgccggtattcctggcgtagccacgccgtacgaaatccaccctgaataattcgagtggcaggaggacgacaagtgagcgataaactcgtctgaaacgaatatctccagccaaaggttggcctctgataacggtcagtgacgcgtgtgaataatccctgcgcacgttcgtgtcacaagaaggaaaacgggcgacaagagccgcccgaaatcatactgcagaacttactccccttcgccggggaacatgaacgggttaattgagcttctggcgaagccctcctgttccatgcgggcgtcgagcaccagggaggccaaatcgtcggcgacggcttcgactttcggatccttctcctgatacataatcttcaggtaggttccgcagtcgccgcagctttcggctttcaccgccgcctgctcgttgtccagcgaccagtagtgcaggtcgcggctctgctcgcagttgctgcacttgacgcgtactacgtgccactcagtttcgcacaggttgcagtgcagatagcgcagcccctgagtggtgccgatttgcacgatgctggagaccggcatcgagccgcacaccgggcagaactggcgctgttcgccgtattcggcgcgcgcttttcctgggatcagactggccatctgcgcccagtagagcgacagcgcagcccagatgaacggcgctttgtcgctactgacggaggcgaaatcggaaacaaacagcgcgctggccatctgctccagctcctgctcagaggctttttccagattctcaatgaccgccagcgccgggccgctcatttccggcttcagctcggcaatcagcgagtgcaacagcttgtgccagtgcttgtcgcgcggcaggacgtggatatccagcggcggcttgccctgttcgctggccgctttaatgcgggcggtgagatccatctgcagcggatggtcgtacagcactacttcctgggcatgggcaatcagcgcggcaaagcgcaggtaatcgcctagcgggttattagcggccagctcgcgcaagcgttcagcgcggcggttatacagatttttcagcctggggaacagtaacggcggaattgcttccgccgtgcgtttctcgctcgaacccagctcgtcttgcgggattatgcgaatactcattcagatgacttttcctgtttctggcggacctctcggtaccagcgcgggtgatgtttcttcgcccacgttttggtaacccagccttccaccatcgcggtaatggtgcctttcacccagagggcggcgtagatatgcaccatgataaccacaattaacgccactgcggcaaatgaatgcagcatcagcgcaaatcggatcaccgggattgagaaagccggcgcaaaatacggacgccagatgatcacaccgctcaccagcagcagtaccaggaagataatcgccgcccagaatacgcatttctggccgaagttatagcgcccggtatcgcccacctcctcgttgacgacgatcttacgaatattcttcgcccaaaagatatcatcccgattgattaggttgtgatgccagtaacggaaaaacatgatgataaacgacgcgaacatcaccaccccgacgaacgggtggagaattcgcgccagctgcggcgtgccgaggatatgcatcagccagttaaaggacgggaagaaaaagcctaacccgctcaccgccgccaggacgaagcagaaggcggtgacccagtggttgatgcgttccggcgccgtgtagcgcacgatggtgtcacgtcttttcatttgcgcacctcgtctttctcttcatgcagattgtcctcttcctcttccgcgcggttcggaccgacgccgacgtagtggaagatactggctgcgaaggtcgcggcgaagccgacggccgccagcggtttccagatgcctttccagaacttgacggtctggctgatctccgggttttccggcaggccgtggtacagattcggcttgtcggcatggtgcagcacgtacatgacgtgggtgccaccgacgccggccggatcgtacaggcccgcattgtcataaccgcgggttttcagctcagccacgcgttcgccggccagcgttttcatatcctctttggagccaaagtggattgcgccggtcggacaggttttcacgcaggcaggctcctggccgacggtcacgcggtctacgcacagggtacatttgtagacgcggttgtcttccgggttcagacgcggtacatcgaacggacagccggcgatacagtagccgcagccgatgcactgctcggactggaagtcgacaatgccgttggcgtactgaatgatcgcgccttctgacgggcaggccttcaggcagcccgggtccgcgcagtgcatgcagccatccttgcggatgagccattccagcttgtcgttttgttccacctccgagaagcgcatgaccgtccatgacttggcggtcaggtccgccgggttgtcatacaccccgacattgtgaccgacttcatcacgaatatcgttccattcggagcaggccacctgacaggctttacagccgatacaggtggtgacgtcgataagcttcgccacctcctgctggtggtcccgcgcctgaggcgcgggggtgaaaccgttagtcgcggaacgacgaataatatcttgcgattggtaagccataagtcgtctccgttacaccttttccacgttcacaaggaaagctttgaactccggcgtctgcgtattcgcatcaccgacgaacggcgtcagggtattggcaataaagccttttttcgccacgccctcatagccccagtgaataggaatgccgatggtatcgatatccttaccgtcaactttcagcgtgcgaatacgtttggtcaccaccgccttggctttgatatagccgcggttggaggaaactttcacggtatcgccgtggccgatgccgagcttattcgccagtttttccccgatctccacgaactgttccggctgggcgatggcgttaagtagcgcatgcttggtccagtagtggaagtgctcggtcagacggtaagtggtgccgacgtacgggaacttctcggccttacccatctgctcgagatcgcctttgaagacgcgagcggccgggttagagaccacgttcgggtgcagcgggttggttccgagcggcgtttcaaacggctcgtagtgttccgggaacggtccttccgccatcttgtcgatagcgaacagacggcccatcccttccggctgcatgataaacggaccgacgtcgctgccaggcgcggcggcgctgtagtccggaatatccacgccgccccatttggcgccgtcccatttcagcaactgacgcttcggatcccacggtttaccctgcgggtccgcggaggcgcggttatacaggatgcggcggttgagcggccaggcccaggcccagcccagggtattgccgagaccggatggatcggcgttatcgcggcgcgccatctggttaccttccggcgtccagctcccggcgaagatccagcagccgctggaggtggtgccatcatctcgcagctgcgcaaaggagctcagctgttggcctttcttgacgatcaccgcgccggttgccgggtcggtgatatccgccagcgctttaccgttgctttccatcgccacttcttccgatgccggctcgtgtggcgtggagtagttccacgtcatgttgagcaccggctccggcgccgggccaccctcttcggcatacatcttacgcaggcgagtgaagataccggcgagaatttcaccatcggtgacggcgatcccgggggcgtccgcgcctttccagtgccactgcagccagcggccggagttgacgatagacccattctcttcggcgaagcaggtggagggcagacggaacacttcggtctggattttcgccggatcgacatcgttcgactcaccatggttttgccagaaggtggacgtttcggtattgagcgggtcgatagtcacgaggaacttcagcttcgacagggaagcgacgaccttgtttttgttcgggaacgaggcgaccgggttaaagccctggcaaatatagccattcactttgccctgattcatcatctcgaagtactgcagaacgtcgtagctcttatcccacttcggcagccagtcatagccccagctgttttccgcggtggctttgtcgccgaagaaggctttcatcatggagacgaagaacttcggatagttgccccagtagttgacctggtctttcagcagcggcttcggcgtgttagccgtcaggtaggtctgcaggtcggcctgtttttcgttcggcagcgacatgtagcctggcaggctggtggagagcaggccgaggtcggtcaggccctggatattggagtggccgcgcagggcgttgacgccgccgcccgccatccccatgttgccgagcagcagctggatcatcgccatggtgcggatattctgcgcaccgatggagtgctgggtccagccgagagcgtacaggaacgatgcggtcttatccggcgcgctggtttcagcaatgtattcacagactttgaggaagtcggccttcggcgtaccgcagatgttttcgaccacatccggggtataacgggaaacatgctgcttcagcaggttccagacgcagcgcggatgttgcagcgtagtatcgcgtttggcgaagccgttttcgtccagctcatagttccagctggttttgtcgtactgacgtttttctgcgttatagccgctgaacagcccgtcgtcgaagctatagtcctcacgcacgatcaggctggcgttggtgtaggcttcggtgtattcgcggttgaatttttcgttattcagcagatacaggatcacgcccgacaggaaggtaatgtcggtaccggaacgaatcggggtatagaaatcagccaccgacgccgtacgcgtaaagcgcggatcgataacgatgagcttggcgccgttatgaattttggcttccatcgcccagcggaaccccaccggatgcgcttctgcggcgttaccgcccatcactacgaccaggttggcgtttttaatatccacccagtggttggtcatagcaccgcgaccaaatgttggagcaagacttgctaccgttggtccgtgtcagacacgcgcctggttatccaccgccagcatcccgagggcgcgggtgaatttttgcgttaaatagccggtttcgttactggaggcggaggcgcacagcatcccggtagtcaaccagcggttgacggtggtgccggcgtcgttttgcgcgataaagttggcgtcgcggtcctctttcatcagcttggcgatgcgatcgaacgcttcgtcccaactgatttgctgccatttatcggagcctggcgcgcgatattccgggaatttcaggcggctttcagaatggataaagtccaccagaccagcccctttcggacagagcgcaccacggttgaccggatgatccggatcgccttcgatatggaaaatggatgctttggcgtttttcgcgccgtcgccgaggctatacatcaacagcccacagccgacagaacagtatgtgcaggtgttacgggtttcgcgcgtgcgcagcaatttgtactgccgtgtctccgcgagcgcagttgccggggcaaagcccagcgctgctgccgtggttcccgccataccgccagcgcagatcttaaagaactgccttctgctgacctgcatggttcgctccttgtttcgacattgtcacatgtagttatttgctttgcggtgaaggccgcaaaggttcagaattagggcaaatttccctcattcctgaagggataaaaacagaataccacattgtgtgtatgcctgttccaatacggttaaagcaaagtgaacaagaagcctctcgaacaaatcaaaaatgtgacgaatgtcacaggatatcgccaggtctccctctggaaacgcgaggatctgcaacaccctcagccagatgagttagcggaagaggtgcccgtcgcgctggtctacaacggtatctctcacgtggtgatgatggcctccccgaaagatctggagcaattcgccgtcggcttctccttatccgaagggattatcgagcaccggcgggagattttcggcatggacgtggtagcggtgtgcaacggccttgaggtgcagattgagctctccagccggcgttttatgggcctcaaagcccggcgtcgcgcgctggccgggcgcaccggctgcggcgtatgcggcgtcgagcagctcaatgatattggtaagccggtccagccgctgccgttcactcagtcgttcgatttagccaatctcgatcaggccctggcgcatcttaacgactttcaaccggttggccggctcaccggctgtactcacgcggccgcgtgggtccggttgacgggcgaactggcgggggggtttgaagacgttggccggcatgtcgccctggataaattgctgggccggcgggcggaagtcggcgaggggtggcagcatggcgccgcgctggtctccagccgcgccagttatgaaatggtgcagaaggcggcgatgtgcggcgtcgagatcctgttcgcggtctcggcggccaccaccttagcagtggaagttgccgagcgctgcaatctgacgctggtgggcttttgcaagccgggcagggcgacagtttacacccatccgcagcgtttaattgcgggttaaatattggtcaataaatttgaacaatgacagcaaatccttccgctttttgtttagcgatgtgcgggctactatttaacacatcaaggcacagcgccttatctaaacaactaaatgaaagggtttatatcatgaaaagcatcaaaacttttgtcgcagtaatcgctatggccgcctctttcgcttccttcgctgctgaaaccgtgaccgcaaccgcctccacaatggacggcgcggaagcgaaaatcgccgcacaggcgcaggctgccggcgcttcgtcttacaaaatcaccgaagcgtttaccggcaaccgcgtgcatatgactgccgaactgaacaaataagcgtatagcaactgtcgaaagagcgcctcagggcgctttttttgtttttgtttttcgcttcccgtctctgcgaaatttgccaatattttcctctgctacgaaaaaaatgtggcactaatcacgtttccgttcttttcttaaatcctcctttttatggcaaaggaaaggtcagcacgcctgaatatctcgattttttaacgccatgaaatttaaagaaataaaaaacagaaagcgatggagatcactctctttaaatgggatgcgtatcacaaaaataggtgtttcgccgtacctgtcaactattcactgcggtaatttaatacgcattatgtgatcttcattgcaaatagaaggcttgtactcagggaaaaatgttgtcaggcaaatgagcgaggatgcgtcatgaaaattggtatcgttattagcggcggggatgtttctggaatgaataattttatattccagatagccaggcaggctaatgctgatatcacgctgtttaatggcggtattccagggctactggagaaaagtcatcaggatatggcgtggcgcgatctggttgattattcaattaccgcggtgccgatcattacctcggggcgaaccagtcgcaaactgcagcgcagtgaatatgaaagcattgctaaaaaacttaaatctctgcgtattgatgtgctcattatggccgggggggatggcagcctgcagtttctgaatacccttagtgaatttgagattaattgctttggtgtgggaatgactatcgataatgatgtgtatggcagtgattatacgattggtttttccacggcctgtgagcaaattattaaagaagtctctcgtttaagaaataccggaagagcgctgcccggtcgggtttttatggttgagatattaggaggctattgtggagaactaacgttgcagtccgccattaaatgtaatgcggatattgccctgatcccggaggcacagatgccgttggccgtgctcgcggaacggattacccggaagctgagtacgcagaatagcgtcgttatcctctgctcagaaggctataccaaagagtactctcccggctttcagggggcgattgataccatgattaaacagctggaaccacaaataggtgtccgtatccgtaaaacgatcgtcggctatggtttacgcagcggtgatccaacctgcgaagagatttatcagggcactattatggccagtgaagtggttcgctgtattcagtcaggtatgaaaaataaagccataataattaattccagtaacaaacctattccgattgatttagtcagtatgaaaaaacgtctggtcgatactgaaggacatcattataaacttgccaagcaactcaatattatttgaggagaccctccatgctgaaaattttatgcgtatgtggctgcggcctcggttcaagctttgccattgaaatgacggcgaaggcagttttaaagaagctggaaattcccgctcatattgaacacaccaccgtttccgaagctggggcctttaaatcggatatgattctgacgcaaaaaacctttgccgacatcttaaccgccgatgccagtgaagaagaaattaaacgtgtcgtggtattgaataaacttactgataaagaggagattgaaactaagatcgtcgcattcttaaaagaacgtcatctgaaggtggctgattatgaatagcttcgtggcgtttatcgttaaggatttactcggccaggcatccattcttattgcttttattgccatgcttggcctgatcctgcaaaagaaatcgccaggcaaaaccgcggaagggacatttaaaacgctgctcggtttcttaattatgatggccgggataaacatcattgtcgccacgctgaccttcctgaatgatatcttcacccagggatttggcatgaaaggctatattaccgatgtggccgccatcgccgggttagcgaatcgggaattaggttcggaggtggcgctgacgctgctggtgatctttgccgtcaatattattatcgcccggctgacgccgctgaaatatatttttctgaccggccaggcgctgctgtggatggcgacgatcggcgccgtgattggctataagtccgggctcaccggcgtaccgctgattttaaccgggggcatcttcggcggcgtgatggcggtgttaatgccggccctggcgcagccggtggtcaggcgcattaccgggtctgacgatgtggccctggggcacttctgtactatcggctatctggtgcaggctgcggtcgctaaagttgtcggaaaaggctctcgctccacggaagatctcgaactgcctgataactttaagtttctgcaggatacctatctggccatggcggtggtgatggtgccgatgtatctcatcccggctatcgcggcggggcctcagtacatcgcgcagttctccggcggcattaattacctgatgtatgccttcatgcagtccattcagtttgtcgccggggtctttgtcctctatagcggcgtgcgtttattactcaatgagctggtgccggcttttcgcggtatcgcgatgcgtattgtcccggatgcaaagcccgctctcgattgcccggtgctatttccctatgcgccgaatgcggtgattgttggatttctggcaacgactatcggctcgattatcggcatgctggttttcccgatgttcggcctggcgatgattctccccgggctgttaaccaactttttcgccggcggtacggcaggggtatttggcaatgcgctgggcggacgtcgcggggcgatgatcggcggggtgattcacggcctgtttatcacatttctgccggccattctggtacccatgctggagagctacggctttacgggcgtcaccttcagcgattcagacgtcatcagctccggtctggtattaggccacgccttccagaataactggctctttgtcgccttgtttattgtgtttgtcgccgcactggcatggtttgtaaacggtaaatccgctaagccgaaaggggaaagtgttcatgagtctgtataattttaatgagattttaaaaatcgctcaggaaagagattttaaagcgattggctcgtttaacttgcactgtattgagatgttaccggcttttttcaaagccgcgcaaaacagccgcagcccattaatgatccaaatatcaaccggtaccgcagagtatctggggtatcggttactggtcgatgccgtgcgttcattagcagacagtgaaaatatcccgacctgcctgcatctcgatcactgctccgatattaaagccatcgagacggcaatgaatgcgggcttttcttcggtgatgtacgacgggtctcacttaagcctcgaggaaaatatcggtaacacgcggattgtggtggaaatggcccggccgtggaatattacggtagaaggtgagctgggggcgatcggcgggtcagaggatggaaaagcggtggctgccgaagatatctgtttcactaccgtcgaagacgcgacgcgttttgtgaaggagacacaggtcgatatgctggccgtctcggtgggcactgtgcatggcctgtacaccggtaaagcgcagatacagcatgcgcggctgaaggcgataagcgaagcgacgggcgtgccgctggtcctgcatggcggcacaggtgtcagcgatgaggatatgcggctggccgtcaccgaagggattaataaagtgaacgtcggaacggaaatgaacgtgcagtgggtcgatcgctgtaaatcaacgtttgagaaaggaaaagtaaatgacagcgtacggaaatttttaattcccgccaaccaggcagtgactgccgtattaatggaaaaaatggcgctatttaaatagcgtttttaccgacacatatcttttgttgccctgtcttccgccagggagggagcttgctatgtttgaatcattgaaaacgctgtggaaaaaagagcaaaacccgctgcaggattatgatcaacagtcccgtcagctggcggaagagatcgccagactggaaggcgaattacagcgccagcccgataatagcgacgtgcaaaaaacattgatgttgacttacaaccgggcattatcggtatatgccaaaagtaagagccaccggcaggatatcgatgcgctgtttctgcagattgataatttacgcaatattattcgccgcaatatctaggaacagagaatgaccataaaagaactgcttattgaggccgatgccattcaggttggcgttgtggagtccgactggcagcgggtaataaagctggctgcccgcccgctggaggcaaaaggctttatttcgacggaatatagccaggcggtgatcgacaatactttaaatcatggcgcttattacgtttttgatgaagggattgccatcccccatgcccgccccgaatgcggcgtcagacgcaactgctttagcctggtggtgctggaaaagcctattccctttgcggacagtgaaaaagcggacattgttattatgtttggcgcccgggacagcaatgcgcatatcgaggagggcatccgttccatcgtcgcgctgctggataataatgacaccatggccaaactgcggacggcccgcagccgggaggaggttgtcgcattactatgaacagacatctgaccccaggctgcaaaacggccattttaatcaacggcattccggcgtcggggaagagcaccattacccgtttgctggcggagacctttagcctgccggtattgacgatcgacggcatcaaagagccgtttatggcgcgcctggcccctgtcgaccggccgatgaatcgccagctgggctgcgcggcgtatgaggtgatctggtcgattgtcggcgcatcgcctgccagcatggtctggttgatcgacgcctggttcggctttcagccgcgggagaccttgcagagactgctacagcaggcgggcgtggagcaggtgattgaggtctggaaccatatctctccggagctggccgtcgcgcgctatgcctcgcggctggcgacgcggccgccgggccaccccggagaagagtatttgccggagctggcccagctggccgggcgggcgcagcccatgtcgttaggacctgtactgacgatagaccagcggcacccgctgcaaatcgaaccggttattcagtggcttgtaggcacgatcgccggacagcacagcggttttacagattacgcttactcgtcctagggcatacccgccaggcgcagcagcgcggtcaccacggcggcggcgataatcacgccgatcagcgggaccttgcgccaggcgaggaacacagcgaaagcaacgcccagaacgcgcgccataccggcgaaatgtgcgccctcatagaaagtggtggccagggcgacggaaaaaagcagcaccgtcgccgcatcggaaagcagcgcctgcgagcgctcggaaaatgccagccgattgccgagcttcgcgccgccgaggcgcatcagataggttcccagcgacaggatggcgataccggcgataaacagcgtcatattgcccattattttttcctcgacagtaaaccgaacagcgaaagcagcactggcagcccggtgggcacaaacggtacggcggcaagcgccagcgcggcgccgctggcggcgcggatcagcgtagtgcggtttttaaaggccgggatcaccagcgccagcaggatcgccgggaagaccgcatcaagcccgatggtttccggcgctggcagcagtttgccgacggccgcgccggttagcgtaccgaggggccagatcagcgcgacgccagcgccgcacagccagtaggccgctttgcgctgcgcgggggtgggctgcgacaagccaaagaccacgctctcgtcgttcataatgtggcacccgataaagcttaaggcgcgccgaccaaccagttcgcgtacggtcaccccgaacgggatatgacgcgcattgactaacaggccggcggcggcggcggccagcggactaccgccgctggcgacaatgccgataaacatgaattcagaagcgcctgccagcacggacaccgaaagcaagagcggcacccataaagggaagccgtaagccaccgccagcgacccataggacatgcccaccaccccgacggcaaggcagaccaaaacaatcgcttttatcgtgtctccgctgagactggagagagtttgtttcatatcacttagccatatcgaacgaatttccattataatgaacacataatgatcgtttttcaaggcgaacgaattgttcgatataaaaaacaaggggcgggtatgacacagccaatcagcgttatcgccaaaagtctggtgcgggagcgggcgcggaccgggctttcgctggcggaagtcgcgcgtcgggcgggtatcgcaaaatccacgctatcgcaactggagtccggcaacggcaacccgagtctggaaacgctgtggtcgctctgcgtagcgctggatattccatttgccaggctgcttgagccgcaggtgaacaaaacgcaggtgatccgccgcggcgaggggaccaaagtggtggcagagcaggcgaactatcaggccattttgctggccgcctgtccgcccggcgcgcgtcgggacatctatttgctgctcacccagcccggcgccgaccgcatttcgcatccgcatccgccaggctcggtggaacatattatcgtcacccaggggcgggcgcgggtagggctgacgtcggcgccggaagagctcggcgagggcgactatatctgctacccggcggatcaggagcatgtttttcaggcgctggagccggatacgcaggccctgctgatcgctgagcaaaactgacatcgcgtcggcgggggacgcgcgctcgctggacgtcatagccatattgcgggaaactagctttcctatgcgaaaacagggatttttatgtcgctgaaagccattgccaaacaacttgggatctccgtcacgaccgtcagccgggcgttgaacggctacgacgatgtgtcgcaggagacccgcgcccgggttgaggctgaagcgcagcgccggggctatcgccccaacactttcgcccgccgtctgaaaatgggcaccatcgatgccgttggtctcgtctttcctgtccgccccgcgccgctcaacaataacgtttttctcgagatggtcggggagatcagccatgagctggcgcgccatgacattgatttgttgctgatcgccgatgatgagcaggcggataaacatggctatatgcgcatggtgcagggccgtcgcgtcgatgcattaatcgtggcccatactctggatgacgatccgcggctggcgcagctgcaggcctccggctttccgtttctggcgctcggccgtagccgcctggcgcagccctacgcctggtttgatttcgataactatgccggcacctgccgcgccacccgccatctgattcaacagggccaccagcgtatcgctctgctgggcgagaacaacaatcaggcgtttattttgcaaaggcgtaacggctacctcgatgccctgcgcgaggcggggttatccgatgcatggctgcgtagcgtgccggcgacgcgccgcggcggctatcaggccacgctggagctgctgcgtctgcctgagccgcctaccgcgattatcaccgactgcaacacccatggcgatggcgccgcgatggcgctcgcccacctggggcgtttaaccggcgacaaccgcgtcgccctggtggtgtacgacgggctgccgcaggacagcatcattgagaccgatgtcgccgcggtgatccagtccacgcgccagggcgtgggaaggcagattgccgatatggtgcgtcgcttaatcgccggggaggatctcgccacgctgcaggtgctatgctatggcagccggaatttttcccgggtgaaaccgcctgatcttacccctttttaacccgtaattctgaagccgatcacggatccgaaacgttttggttggcatccgaaacgtttcggatcaacagtaagacattccttgtaatggagatgtctgatgtctgattcgctgattcacctgcaaagcgccggtgccgatgttgtgattaaaacccgccctttcgccgaaattgtctactggggaccgcatttaagccacttttcgccgcaggatgccgacagcctgacgcgcccggtcgccaacggcagactggatgtcgattcgccagtgaccttaatggcggagctgggccatggtctgtttggcgcgccgggcattgaaggccatcgtcaggggctggatgcctctccgctgttcaccaccagcgaagtgcggcacgagggccagacgctgaccctggtcagcgaagatccgcaggccggcctgcgcctgcagagcgagatcgcgttggatgccagcggcgtgctgagcgtgcgccatggcgtgaccaatctgcgcgccagcccatggcaggtggatcgcctggcggtcacgctgccggtcgccgaacgcgctcgcgaggtgatggctttccatggccgctggatccgcgagtttcagcctcatcgcctgacgctggagcacgacagctttgtgctggagaaccgccgcgggcgcacctctcacgaacatttcccggccctgatcaccggcagccgcgcctttagcgagatgcagggtgaagtctggggcgtgcatctggcctggagcggtaaccatcgcctgcgggcggaggtgaaaaccgatggccgtcgctatctgcaggccgaggcgctctatctgccgggtgaaatggcgctggcggaaggggaaaccttgtggacgccgtacctgtatgccagctactcggcgaatgggctgaacggcatgagccagcagttccatcgttatctgcgcgaacggattattcgtttcccgggcaacaaaccgcgcccggtgcatctcaacacctgggaggggatctatttcgaccacgacccggactacatcatgcgtatggccgacgaagcggcggccctgggcgtcgagcgctttattatcgatgacggctggtttaaagggcgcaacgacgactgggcggcgcttggcgactggtatctcgatgagaaaaaatacccctacggcctgacgccggttatcgatcacgtgaagtctctgggtatggaattcggtatctgggtggagccggaaatgattaacccggattccgatctgtaccgggcgcacccggactgggtgctggcgctgccgggctataccccgctgaccggccgccatcagtttgtcctgaacctcaacattcccgaagcgtttgattatctgctggagcggatgagctggctgctgggcgagcatgcggtggactacgtgaagtgggatatgaaccgcgagttggtgcagcctgggcatcagggacgcgccgctgcagacgcgcaaacgcgccagttttaccgcctgctggatacgctggtggcccgtttcccgcacattgaatttgaatcctgctcctccggcggcggacggatcgattatgaagtcctcaaacgcagccatcgcttctgggcgtctgacaacaatgacgcccttgagcgcaacaccatccagcgcggcatgagctacttctttccacccgaggtaatgggcgcgcatattggcaatcgccactgtcatgccaccttccgccagcatagtatcgccttccgcggcctgacggcgctgttcggtcatatgggccttgagctggatccggtgagcgccgatgaagaagagcgcgccggataccgaaaatatgcggccctgcataaacagtggcgcgacgtgatccatcacggcgtgcagtggcgaatagatatgccggacgccaccacccttgcccatggcgtcgtcagcccggataaagcgcaggcgatcttcctcgttagccagctggcgatgccggactacaccctgatggcgcccctgcgcctggcgggcctggaggcgagcgcccgctatcaggtgacgctcctcgatcatccgaacattcagatcaccggtgagggcggccacaccatgcggaagctgccggcatggatgacgacgccgcagacggtgagcggtgagtggctgcagcaggcggggctggcgctacccatcctcgacccggaaagcgccattctgattggtctgcaacgcgtgtgatggtatcgggctgcgctgcggcccttcttgaggaaaatataatgaacccgaccgtctgtacccacaaaaacaaccccaacttctggattttcgggctgttcttctttctctacttcttcatcatggccacctgctttccgtttctgccgatctggctgtcggacgtcatcggcctgaataaaaccgaaaccggcctcgttttctccagcctgtcgctgttcgccatctgtttccagccgatcctcggagtgatctctgacaagctggggctgaaaaaacacctgatgtggatcgtgaccgttctgctggtgctgattgctcccttcttcctttatgttttcgctccgctgctgaaaaccaatatctggctcggggcgctgagcggcggcgcctatatcggctttgcattctccgcaggcgccggcgcgatggaggcctatatcgaacgggtaagccgcaacagcgggtttgaatacggcaaggcgcgcacctttggctgcctgggatgggcgctgtgcgcgactaccgccggaatgctgttcagcattaatccagaatgggtgttctggatggggtcagccgccgcgctgctgctggtggtgctggtggccatcgccaaaccgcaggccagtcagtccgcgcaggtgatggattcgctcggcgccaatcgcccggcgatcgatttaaaaacggcggtgcgcatgttccgccagcgtaagatgtggatgtttattctgtatgttatcggcgtggcctgcgtgtatgacgttttcgatcagcagttcgccaccttcttcaaatcgttcttcgcgaccccggaagcgggcacccgcgcctttggtttcgccaccaccgcgggagaaatatgtaacgccatcattatgttcagctcgccgtggattattaaccgtatcggagcgaagaataccctgctgatcgccgggatggtgatggcggcaagaatgattggctcttccttcgccaccaccgccgcggaagtcgtagcgttgaaaatgctccatgcgctggaggtgccgttcctgctggtgggcgcctttaaatacatcaccggcgtgtttgacgtccggctgtcggcgaccatttacctggtgggcttccagttcgccaagcaggtggcagcgatcttcctctccgccttcgccggcaatatgtacgatcggatcggtttccaggagacctatatgatcctcggtggtattgctctgacggttaccttaatatccgcgtttacgttagcgggtaagacgaaaaccgagccgctgcgcgataatgcaatgaccgtttaatcgaccggcctcccgtctggagggaggccagttatttttacgccagataaaacacttctttgagctccgcgctcagcgggctgttgtccgggttgctgggcatcacctcgcgcatgtatttccaccaacgctggcatacttccgtgctggcgaccgcttcccagcgggcttccgattcaatctccaccgtcgcgaacaggagatggcgttctttatcgagataaatggcgtagtggtgcgcgccgtgatccttcaacactgcctccagctccggccagatggggttatggcggcgctggtactcctcgtgcgcgtcggggttcacctgcatgacgaaggctttacggatcataaggcctccagatagagctcgcgaacctcatcgcggctggcggggcgcgggttacacggcgcgcatgggtcggccagcgctttatccagccagccttcgatatcggctttgctgacgccaagctggctgaaaccctgggggatccctacgcgtttgctcagcgtgcggatggcattgatggcctccatgctggcagcttcatcactcatgccgcgagtatcgacgcccatcgcctgcgccacgcgggcaaagcgcgccaccgcgttcgggcggttaaagttttcgatgatcggcagcaggatggcgttgcataccccgtgcggcaggttgtgggtcgcgccaggctgatgggccagggcatgtaccagcccgagaccggcgctgttgaacgccatgcccgccagatactggccaaacgccatctgctcgcgggcctgcagatcgtgcccatcgtctaccgctttcggcagccacaggttaatcaggcggatggcttcgagggcgttggcgtcggtcagcggatgggcgccaacggagacaaaggcctcgatggcgtgggtcagggcatccatgccggtggcggcggtaacggctggcggaatgtcgagcatcacgctggcgtcgtcaacggcgatatccgggatcaggttcgggtcgataatcacctctttcacctgccgctcgctatcgataattaccgcgttgctggtcatctccgccgccgtgccggcggtggtgttgatggccaccagcggcacgccagcgtttttcactttgccgacgccggagtaggcggtggaggggcctgggttggcggtgaggatttttatcgctttggcggtatcaatcgggctaccgccgccgaaggcgatcaggtaatcgcagcgggccgcctggtaagccgcatagccttgctgcaccagcgcttcggtggggttggggaatacctcgtcaaatagctgataagccatctgctgttcatccagcgcggcgaacaggctgtccagcaggcccagcttcaccagctgaccgtcggtgacgatcagcgccttgccccattgtttgcccgctaccagcttgaccatatcaccgatcgcgcctgcgccgtggaggctgattttaggtagtgccaacataaaactcatgataattctccttaatgttgattttgggaaatccgtttcccctcaccccgaccttctcccgcagggagggggccagggtgagggggaaattaacatcgtcttcgctgcatcatccgccgggtaataatcggcagggagatcaccacgatcagcatggcgccgataatcaccgacatcacgatgccggggacgttcagcaggctcaggccgaaggtcaccagccccatcagaaaggcggcgatgatcaccccgggcatgctgccggagccgccgagaatattgacgccgccgagcaccgccatggtgacaaccgccagctcccagcccatcgccagggtggggcgggtactgccgagccgtgaggtcagcaggaccgccgccagcccggccatcagcccaaccagcgcgaacagcaccaggttatgacgcttaacgttgatcccagagaaccaggcgccggtcgggttattgccgatggcgtaggtccggcgaccaaagttggttttatgcagcaggaaggtgaaggcggccgcgaggaggataaacagcgcaaactcaaaagagagcgccccccacacgtacccttggccgaaccaggcaaagctctccggatagtgattgagtgcctgatcgcccagcaggatataggtgatgccgcgatacaggctcatggtgccgatggtgatcacaatggacgacaggttaaagcgggtcaccagcaagccgttgaacaggccgcacagcagacctacgcccaggccgatgaccaccagcagcggagtgtccatccccgctgccgcgcagaagcccatcaccgttgagctgagcgccatcgtcgaggctaccgacagatcgatttcccgggcgataatcagcatcgccatcggcaggacgacgatcgccttctcggtaaaggtaaaggtggcgtccgacaggttccagatattgaggaagtacggggaagccacggcgttgccgataaataccgccagggtgaccgccagtaaaaacccttcccagcacagcaggcggcgcagcggcgacggcgcggccggggcgtttttcatctcttcagataccatcattttgctcatgatttcaccgcctgtttctgtcgggctaacgccgcgttgcgcaggattaaccgcccgtgaccgcgattgccgcgctcgttgagcagcaccgccatgacgatcaccgccccggaaatcgccatctgccagaagggcgagatgccgatcaccggcagggcgttattaatgaccccgaggaacagcgcgccgcacaggcagcccagcacccgtccgcttccgcccatggtgctgataccgccgatcacgcaggcggcgaccacctggagttcaaaaccgttggcgacgtcgacataggcgacggcgaagcgcgagatccacagatagccgcagaagccggccagcgcgccggagagacagaagctgacgaactgcatttttccggcgttaatgccggtgtagtatgccgccgtcgcgttgccgcccgcggtgtataaggcccggccggtgcggctgtagtgcaggaaataacccaccagcagcagcgcggcgatggcgcaccagctcagtagcggcagcccaaggagggggctgcgcggcagactgagaaaatcagcactcatctgatgtgagttaacccagccgccgtcagtcagcaggaagataatgccgcgataaatgctcatggtgcccagggtcaccacaatggcgggaatgccgaggcgccagaccagcaggccgttaattactcccatcagcaggcccagcagagtcgccagcgccagcagcgctaccaccggaatacccggatagtgggcgttaagcagggcgacgatcatcccggtcagcgccaggttggcggccatcgacagatcaatgcctttggtgagcaacaccatcatctggccgagggcgaggatgataaggatggcggtatcgttaaacatctccaccagattgcccggtgaaacgaacgacggcgcccggctgccgatggcgccgatcatcaaaataatgaccaccgccagcagcgcttcgcgatgtttcagccatgcgtgtcccatcatgccgcctcctggccgatgccgctagcggcgctaacgatggtttccgccgtcgcttccccggcccggtactcggcgaccatcagcccttcgtgcattacgataatccggtcggccatgcccatcacttccggcagctctgacgacaccataatcaccgccagcccctggctgaccagctcggacataaactgatgcacggcggcctttgagccgatatcgatgcctttggtcggctcatcgagaatgatcacctcgggctgggtcgccagccatttgccaatcaccactttctgctggttgccgccggagagggtctccaccggctgccgccagctgaaggctttaacctgcaggcgcgaggcgtactcgtcggccagccgccattcccggccgtcgttcaggatgccgttaggattgagcttgctgagctgcggtaaactgatgttctgggcgataggcagggcgatgatcgctccctgtttctgccgctcttccggcacgcagacgatgcccgcgcggatggcgtcggcgggctggtgaaagcgcatggttctgccgttcaggcggatctcgccggaggaggggcgcgaaacaccggagagcgcctgcatcagctcggtgcgtccggcgcccaccaggccgtaaaagccgagaatttctcccttgcgcaggcggaagctgatatgggcaaactcggtaggatgacagagatcggtcacctccagcaccgtttctccgggggtgcagtcgactttcgggtaggtttggctgatcgcccggcccaccatcatcgacaccatccgctcttcggtgatgtcgcttatcgccccggagctgacgtacaccccatcgcgcaggatggtgtaataatcggccagctcgaagatttcatcgaacttatgcgagataaacaggatcgctttgccgtcctgcttcagacgctcaacgatgtgataaaactccaggatttcatgctgggaaagcgcggcggtcggctcatcgaggatcaccacctgggcgtcgaaagccagcgcccgggcaatcgccaccatgtgacgctgggcgatgctgagggttttcagcgtggctcgcgggtcgatctggacttccagccgggtgaggatctcgttggctctgcggtgcatcgtcggccagtcgagcgttttcagcagtcccttatacagatactggccgacgaaaatgttttcgctgaccgagagttcgtcaaacagcacggtttcctggtgaatggcggtgatccctaccttatgcgccgactccggcgttggcagatgaatggggatcgctttatagaggatctcgccctcttcgggctgataaataccggtcatcactttgaccagcgtggatttccccgcgccgttttcgccgattaaggcggtcactttgccgggccagagatcaagctgcacgttctcaagggcgcgcacaccgggaaaaattttggtgatcccttcagcgacagcagtggcgttgatgctgacatgatagttctccacaaaaatcacccctcaccctaaccctcccccacaggggcgagggaacggtccggcgtccgctggccgcatcgcgcagagggccagccgttccccctctccctccgggagagggccggggtgagggaacaaggattagaaaattttcgagaacttatcgatgttgctcgcatcgtagacaaacggcttggccatcgcgccattcccctcggcgtccagcttcactttgcccagcttgcccatactggcttcggttttggtcgccgtgcctttgactaaatcgtcggccagataggtggcggcgtagcccaggtcaatcgggttccagatggcgaagcttttgctggcgccggacttgatcgcgccggccatttccgacggcagccccagcccggtgacatacactttgccgattttgccctggtccttcaccgcctgcgcggcggcaacaatccccaccgacgacggcgagacaatgactttcaggtccggatatgatttcagcagacccaccgcttcgcggtagcttttatccgacagatcgtcaccgtaggcgacggtgaccagctgcaccgacggatactgcggtagcacctttttcatctcctcaatccagatgttctggttcgtggaggttggggtggcgcttaacacggccacctcgcctttctcaacgttcagcgcctgcagcgcatcggcggcaagcttgacgttggtttcgccaattaaggcgttatttgaggggttaagatggatctgacggcctgccggcgccacgccggagtcccatgagaccaccttgatgccgcgctgcatcgcttttttcagcaccggcaccaccgcgtccggatcgttggcggaaatggcgatcgcatccaccccctgggcgatcaacccgttcagcacgtcgatctgcgcctcggcggtggtagtggtcgggccggtgtagatcactttgacatcacctaactccttggctgcctgttgggcgccaacgttggcggcttcgaagaagccatttcccagcgatttcgccacaagggcgattttaacttcggctaaggcggaaccggacaacgccagggcggcaacggtgaggatcaagcttgtctttgttttcattgcttttactccacatgagttagttttgtagggtttgcaggtgatatttcgccccgtctcggtgagcggggcgcgatgttgttatggataaagatctaaagcggactgcagcggctgcacgttgaagcgtttgccaagggcgataagctcgtcgcgggtgatggtctgcttcatcccgcccatcgacaagactttcaccagcacttcggcggacttctcggcggtatcgatcaggccgaaggtctcatccagcgtggggccgctgccgaagacgccgtggaacggccacagcaccagcgagtgtttttgcatggtttcggcggtcgcctggccgatttcatcggtacccggcaccatccacggcagaatgccgacgccatccgggaagaccaccagacattcggtgctaccttcccacagcttacgggtgaaaagatcgctgtggttctccagaacataggtcagggcgatcaggttggtggcatggcagtgcatgatcacccggtctttgccgccggtcagtttgatgcgctcgctgtgcgacaggaagtgtgccggcagctcggaggtcgggacggcatcctccgtcaggccccacaggatatggtatcccgcgccgtcgctgtcgaccttcaccacgccgaggttagcggccgggtcgagctggacgttacggaagaatttgccggagccggtgacgataaacggctggttggccagggttggcatcggctggctgagggcgatatagcgcggtttggcgtggaaatccgccgcgtaaggttcgatatccgcttcatccagacgcagcgtcaggttgccgccgttgcgttcgtcccagcctttcagccaggcgtcggaggtggctttgatcatgccctggacgaaccaggcgtcgataatggtctgcatagtcttgtctttcctgttgattcggtgcggggttgaccccctcaccctaaataggtgcgtgcccccggattgcgccgtaaacggcttatccgggctaccggttcgtagcccgggtaaggcgtcagccgcgacccggggaagctcgtgcattacccgcgctggctcagaaccgcattctcataagcccgtacgctgtccagccactggctacccgccggcgtgtcgtgacgctgacagtacatctcccagatggcctgccaaggcagcgatttttgctcttcgagcagcgccaggcgggcggtgtaatcgccgtcgttctccagctggcgcagctgggcggtcggttccagcagggcgcgcagcagcgcttttttcatattgcgggtgccaatcacccaggccgcgatgcggttgatggaggcatcgaagaagtcgaggccgatgtgcacgcggtcaaacaggttatggcgaatgatttcgctggcgatggcctgggtttcatcatccagcagcaccacgtggtcgctgtcccagcgcaccggacggctgacgtgcagcagcaggcgcgggatgtagagcatggcggcggagatcttgtcggagatcacttccgtcggatggaagtggccggcatcgaggcacagcgccgtctgacggctggtggcgtaacccatatagaactcgttggagccgacggtgtagctttcggcgccgatgccgaacagcttgctctccacggcgtcgatatggtgcgccgggtcgagcttctcgctgatcacctcatccagggcgttcagcagccgctggcgcggggcgaagcggtcaacggtaatatccttcatgccgtccggcacccagatattcatcaccgacggcgtgcccagctgttcgccaaaataagcggatacgcggcggctggctttgcagtggtcgatccagaactggcggatctcatcgttggcgtgcgacagggtaaagccgtcggcgctcagcggatgcgagaagcaggaggggttgaaatccagccccagtttgttggctttcgcccacgtaacccagtttttaaagtgctccggcttaatctcattgcgggctaccggcgcgtcggattccaggtaaatagcgtgcagattgagacgctttggccccgggatcaggctcagcgcctgctcaaggtcggcgcggagttcttctgcattgcgcgctttgcccgggtagttgccggtcgcctggatgccaccggtcaggcttcccgccgggttttcgaaaccggcgacgtcgtcaccctgccagcagtgcatggagacgggcagacggtccagctggcgcagggcctcctcgacatccacgccgacggcggcgtagcgctgcttagcaatttcccaggcttgttcaagttgagtggtcatgcgcaaagctccttggtctgttgtggctgaaactgcgccacgaaacgggcaatttcactatcaggattgggggtaaaagtggtgagcgccgcgttgccgcgcactacctgacgaaactcatcgacattggccagctcgtcgagggtcattaactggatgccgatattgccgagggtggaggcctctatcgggccggccacgacggcgatcccgcaggcgtcagcgcacagctggttgagcagcgtgttctgacagccgccgccgacgatatgcagctggctgaaagggtggccgcgcagcgccgccagctcgttaagcacccgggcgtagaacagcgccaggctgtcgaaaatgcagcgcgccagttcggcatcgctttcaggaaccggctgcccggcgtcgcgacaggcggcctggatctcggcgctcatactggccgggttgataaagcggtcatcgttgcagtcaattatgaagcggcacgccggtagcgcggcggtgcgggcgatcagcccctgcaggtcgctgacgttttgctcttttagcacccgctgcagcagccacaggcccatgatatttttcagcacccgatagcggccttcggctccgccttcgttggtgatattggcctgcagcgccgcgtcgcaggtgtacggcgtcaggctttcaaaccccatcagcgaccaggtgccggaggagagataggcggcatggcggtcggccagcggggaggcgatcaccgcgctggcggtgtcgtggctggcgacagcgactaccggaattcggttaccctgcgggcagatccagtggcctatcacattgccggggtgggtcggctttccgaaccacgccaacggcgcgccggtccagttcagcagcgtctcatcccagctatcgctgttaatattgaccagctgggtggtggtggcgttggtatattcccagttcagattgccggtcaggcggaagctgaaatagtcggggatcagcagggcatgggcagcctgactgaccagctccggctgctgctccaccagcgcgcgcagctgataaagcgtgttaaacggcaaaaactgaatgccgctgcggcgatagatttccgccctgcccagctgcgcttcagcgtgacgcagcaggccctgggtgcggtcgtcacgataggaaatcggcagcccgacgcgctggccctgcttatccagcaggacataatctaccccccaggtatcgatgccgatactgtctatcagaatgccctgctcacacactttctccagcccgcggcggatctcgccttccaggctatctacatcccagcagtcgaagccgtctactttctgcagactattggtgaagcgatgaatttcgcgcagcgtcagggcgcgcggcccgggctgatagctggcgagcatcacccgcccgctggaggcgcctaaatcgacagcgacacaatgacgaatactcatgaaacgatccttcttaaaatcattgtccgcagtctaaaaaaggccgtttactgacaccttctcgctacggacagccaaaactggccgctggcaagaaagcaaaggtgaccgtgagggacatcacagtttgcggttttaggggatggcgagggggatgtgatggcctccgcagttccgcatctttccggctgattcttgaaaaagcggcaggatttacgaatttcgcggtcaaaaattgaaggccggatagccaacccttcattactatcagccggtgactgataatttttctcattacgagggtggcatcatgaccatattgcacagtacggatttctttaaggccgggatctcgacggtggctattgaaccccgcctccctcagtcggcctttccggaacatcaccatgatttccatgaaatagttatcgtggagcagggatcgggtattcacgtcttcaatggccagccctacaccattggcggcggttcggtctgttttatccgcgatcacgaccgccatctttacgagcacacggataatctgtgtctgaccaatgtgctctatcgcgcgccggatgcgtttcgctttctcgccggggtcagtcaactactgccccaggaacaggaaggaaactacccctcgcactggcgggtgaatcaaaccgtcctgcaacaggtgcggcatatcgtggcgcagatcgaggccgtggggagcgaaacggatactcatgccgtcgccagccgtgagatcctgtttatgcagctgctggtgctgttacgtaaaagcagccttgcggaagaggccaccaacaacgatgcgcggctgaatcagctgttggcctggctcgaagaccattttgcgcaggagatctgctgggaggaggtggcggcgcagttttcgctgtcgctgcgtacgctgcaccgccagctgaagcagcaaaccggtctgacgccacagcgctatcttaatcgggtgcgcctgatgaaagcccgccacctgctgcgccacagcgatgaaagcgtgactgatatcgcttatcgctgcggcttcggcgacagtaaccacttttcgacgctttttcgccgggagttcgactggtcgccgcgcgatatccgccaggggcgcgacgccattcttcagtaacgcgagaagagtcaacgtattgcagactaaaaacgcgaataatgcgccgttatccgcgtttggagtgtgagccgtggccggtctgattttacgtaaagaggagtttttcccttccgccacacaggcagtggcggtggcagaccgctacccgcaaaatgtctttgccgaacatacccatgagttcagcgagctggtgctggtgtggcgaggcaacgggctgcacgtccttaacgatcgtccctggcgcattacccgcggcgatctgttctacattcgcgccgaagataaacactcctatgcttccgttaacgatctggttctgcagaacatcatctattgcccggagcggctgcagctcaattttgactgggccggggcgatccctggcctcttcggtacgccgtggaagccccactggcgcatgggcagcacaggtatggcgcaggcgcgccaggtgattagccagcttgagcatgagtgcgcccggcgcgacgcgcagggaaatgcgatggccgaactgctttttgcccagctggcgctgacgttgcagcgccatcgctatgcgacggatgatcccgcggcgacgcagcgcgaagcgctgctggacaaactgctggccgcgctggcggccagccttagccgcccctttgttctggagcgtttctgcgagcaggagggcggcagcgagcgggcgcttcgccagcagtttcgccagcaaaccgggatgaccatcaatcactatttacgccagctgcggatctgccatgcgcagtatctgctgcagcataccgagcgcttaatcggcgatatcgccatgcagtgcggctttgaggacagtaactacttttcggtggtttttagccgggaaatcggcatgtcgccggggcagtggcggcagcgcagtcgcgccgccgcctgaagagcgtcgttgtcaggcagatgatccggtgattaactggccattcccagaccgacgatattggcggcgatgatgatcaccacgcagccgaggctcaggacgctcaccggacgacggccggcgttgttccactccttcagcaccagacccaccacaccgccgcacagcacgtagaaactcatgtgcagcatccagctcatataatcatactgcgccggaatgctggcgtggccccaggcatagaagaagaactggagataccacatcagaccgccgagggcagagagcagaaggttgctgatgataagcggtttggccagcgagaaatcggctttgactgacaggttcttcactttcgccagacgaataaagcagaagccaaggttaaccagcgccccgccgcccataatcaccacgtagcttggcagcgctgcgtacagcgggtcgacgccgagcgccgcggcggcatcatgcatcggtttggcggcgttcatcgcgaacgacatccctgcggagaagataccgcacattaccgccagcagaagccctttcttcagattgaactcttcggctttgatgcccattttgcgctctttcagctggcctgcgcgggtgacgatgccgacgccaatcaccgccaccagcacgccgagcagcgtcatttgaccgccctgggtgcgcatcagcactgcaaactgaccgttaataatcggcgtcatcagcgtgccgacaatcagcgtgatgccaatggcgatgccaatccccatcgacatgccaagatagcgcatggtcaggccatagttgatattaccaatgccccacatggcgccgaacagaaagaccggcagcagcgtggaggcgctaaaagagcggtagtaggcccagaagtcgggtaacagcgtggcgctgatggcccagggcagaatcagccaggagacgatccccccgaccgaccacatggtttcccacgaccagtgttttactttcttgaacggggcatagaaacaggcggcactggcggcccctatcaaatgccaaaaaatacccatcgtaatcgcgtggttcattgattttatcctcatctttttttatcggagacggcggcttccgatgggatgagtgtaaaaattggccgctttggccgccttcaggacgttgccacaggatggcgaaccctggcaaccatgggcttaattagttgttctacatcacaaaacgacgggtatttcttctggttatatccatatgaaaaatacggcattgataagcattttcaataccatttaattaactataatggacaaactgcttacgcggcgttaacacttgagccgctcgacaataatggagatgattatgagctataccctgccatccctgccttacgcttacgatgctctggaaccgcacttcgacaagcagacgatggagatccatcacactaaacaccaccagacctacgtgaacaatgccaacgccgcgctggaaagcctgccggagttcgctaacctgtccgctgaagagctgattaccaagctggatcagctgccggctgacaaaaaaaccgtactgcgtaacaacgccggcggccacgcgaaccacagcctgttctggaaaggcctgaaaaccggtaccaccctgcagggcgacctgaaagcggctatcgagcgcgatttcggttccgtggagaacttcaaagcggaattcgaaaaagccgctgctacccgtttcggctccggctgggcgtggctggtcctgaaaggtgacaaactggccgttgtctccaccgccaaccaggattccccgctgatgggcgaagccatttccggcgcttccggcttcccgattatcggcctggacgtctgggaacacgcttactacctgaaattccagaaccgccgcccggactacatcaaagccttctgggacgtagtgaactgggacgaagctgcagcgcgttttgccgccaaaaaataaggttgcattgcgctaaaagagaagcgagtctgatgactcgctttttttatatctgtagcaaggagagcagccatgcattatccggtgaatgtctttgtcggcaaaatcagggactacgcgggcagtcgccccagcgcgatcgacaaaatccaggtcgacggagaattgcagctcggcgatctcggtctcgatggggaccagcaggcggagaagaaaatccacggcgggccggaccgcgcgctgtgtcattatccgcgcgaacactatgccgactggatccgtgacttcccccagcaggccgagcggttctgcgcgccggcgttcggcgaaaacctctccaccaccgggcttaccgagcaaaacgtttatatcggcgatatctttcgctggggcgaggcgctgatccaggtcacccagccgcgatcgccgtgcttcaagctcaactttcattttgcgatcaatgatatggcgcagctgatgcaaaacagcggaaaaaccggctggctgtaccgggtgattgccggagggcaagtttccagcgatgcgccgctcgagctggtttcccggctgagtgatgtcagcgttcatgaggccggggcgattgcctggcagatgccgtttgatgatgatcagtaccaccgcttattgtcggcagcgggcctgtctgttagctggagccgaacgatgcagaaacggcgtttaagcggcaagatagaggatagttcgcggagattatgggggaaataatcccccatattaagtattcccggggatgctcccggcgcagcgccgcacagcgcaggccgggtcggcgtcaggttcgtttatacagcggcagccagattgttaaacgcagaccacccagcgggctgtcgtcggccttcacccagccgcggtgctgctgaatagcggtttcgacaatcgccagccccaggccggtgccgccggactcgcggtcgcgcgcctcgtcggtccggtagaatggccggaaaatctgttcgcgatcctccgggctgactcccgggccgtcgtcatcgacgttaaccgtaatcccgtctttatccaccgagaagctgacggaaattttcgtatgcgagtagcgcagggcgttgcgcacgatattctccagcgcgctttccagcgcattggggttaccgtacagcggccatgggcccggcggatactcaacggtgaaagatttccccatctgctcagcttcaaacgccgcattgtccaacacttcgttccatagctgattggctttcaccgtctcgctgaccagggcgtttttcgcctgattgcgcgacatcaccagcaggtcgttgatcatgctgtccagccggtgcgcttcggtttcgatacgctccagctccttgctctctccgctgcggcgacgcagcagggcggtacccaattgcaggcgcgtaagcggcgtgcgcagctcgtgcgagatatcggacagcagccgctgctggctggtcatcatccgctccagggccgtcaccatttggttaaaactggcgccagcggctaaaaactcctgcggcccggcttccagctccggatgctggcgcaggttgccctgggcgacttcatcggcggcatttttcagcttacgcgccggtttcgccaggctccacgccagccacagcagcagcggggcgctgaccagcatcgtgacgatcagcagcagcagcggccggtcaaacagcaggttgataaagtcggattgtgaggtgctggcgggacgaatcagatagagctgatagttatcctccccgtcccggacggaaaacgggcccaccatttccaggcggccatagcgttttttctgcggatgatcggcgttatcggcctggccgataaagttacgaatgatctgcatctcgttgcgttctgcgccgatcacgcggccttcgctggtcaccagcagcaggcgttgtcccggaggcgcccatttatcgatggcgcgaaacaaacgacgccaccacatcaggtcgtttggcggatcgttggccagctcggcctcgacgtgctgctcgatcatgatgccctgacgctgctcgctttccagcagctcggtcatctgccgggaatccagtttgggcaacatcagcaccagcatcaacaccagcgccagcgtgagccagaagatggcgaagatgcgtgcagtcaaacttccaatcatgaagcggaaaccatcagatacccgcggccacgcagcgttttaaaccacggatggccatctttgcgctccggcagcttacgccgcaggttggaaatatgcatatcgatggcgcggtcgaacggcgtcaggcgcttgcctaacacttcctggcttaaatgctcacgggagactacctgaccgagatgctgcgctaacagatagagcagggtgaactcggtgccggtgagctccagcgtctggccatcgaaattggcttcctggcggcccggattgaggcttaaggcatccacttccagggttggtgagccggcttcggtcgtctgctgctgctcgctccagtgggaacggcgcagaatcgcgcgtatacgggccaccagctcgcgatcgttgaatggcttaggcaaatagtcatccgcgcccagctcgaggccgagaacgcgatccagctcgcttccgcgcgctgttagcatgataaccggagtctggtgtgtctgacgcagctctttcagcgtatcgataccgtttttcttcggcatcatcacgtcgagcagcaataaatcaacgctgtcgtccagaagggccagcgcctgttccccatcatgggccaccagcacgttaaaaccttccatatcgagcagctcttttaacagggaggtgagctcccggtcatcatcaactaacaggattttattcattgtttaaatacctccgaggcagaaattacgtcatcaaggcccgctaatccatgactttacgttgttttacaccccctgacgcatgtttgcagcctgaatcgtagactgtctctcgttgaatcgcgacacaaacgttttgggagtatgtgatgcgcaatgttatcgctgccgtcatggcctcaacgctggcgctaagtgcatatagccaggccgctgaagtcgttaccagcgttaactggctccccggagacgaagggggacagcgcggtagccaaagccatatgtttgacggcataagtttaaccgagcagcaacgtcagcagttacgggatcttatgcaacgggcacgccacgacaggctccccgttaatgttagcgaaatggagacaatgcatcgccttgtcaccgcagaaaattttgatgaaaacgctgtgcgcgctcaggcagaaaagatggcgcaggaacaggttgcccgccaggtcgagatggctaaggttcgcaaccagatgtaccacctgcttacgccagagcagcaagcggttttaaatgctaagcaccagcagcgtatggatcagttgcgtgaggttgcaaggatgcagaaaggctcagcgatgatgctttcgagtagtagcaacaccctgcaaccccagtaacaaaccctgttttccttgccatagacaccatccctgtcttcccccacatgatgtgggggttttttttgccctttttacggtaaatcaactccttcgcctatcccgtgagcgtcacaagttcgggttatactaagcgcattgcaggagaaggagcctatatgaatcaatcttatggccggttggtgagccgcgccgctatcgccgcgacggctatggcctccgcgttacttttgatcaaaatttttgcgtggtggtataccggttctgtcagtattctggctgcgctggtggattcgctggtggacattgccgcctcgctgaccaacctgctggtggttcgctattcgctacagcctgctgatgaagaacatacctttggtcatggcaaagcggagtcgctggcggcgctggcgcaaagcatgtttatctccggctcggcgctgttcctgtttctcaccggcattcagcacctggtgcgtccggagccgctgcaggccgccggcgtcggggtcgtcgtcacattgatcgccctcgttagtacgctggcgctggtgactttccagcgctgggtggtgcgaaaaacccagagccaggcggtgcgggcggatatgcttcattatcagtctgatgttatgatgaacggcgccattctggtggcgctgggcctctcctggtacggctggcatcgcgccgacgcgttgtttgccctggggattggcatctatattttatatagcgcgctgcggatgggctatgaggcggttcagtcactactcgaccgcgccttgcctgacgaggagcgtcaggacattatcaccatcgtgaccgcatggcccggcatccgcggggcgcacgatctacgaacgcggcagtcagggccgacccgctttattcagattcatttggaaatggaagataacctcccgctggtgcaagctcacgtgattgcagaccaggtggagcaggcgattctgcgccgtttcccggggtccgatgtcattatccatcaggatcccagctctgtggtgccagcggcgcagcagggcttttttgagcgttaggttatagtctgtaaactcgatgtaaaaatgtggggcagatcggcattttttgtataaattaccgccgtttggtctgacctgaatcaattcagcttgaggcgtttgatatactattgtcattagcgtcgtgcactcctggtgagggagcgcttcaggcaacagaattattttttgcttcctaagttcagaggtagtcatgattaagaaaatcggtgtgttgacaagtggcggtgatgcgccgggcatgaacgcagcaattcgtggcgttgtgcgcgcggcattaacggaaggtctggaagtttttggaatctatgacggttacctcggattgtatgaagaccgtatggttcagctcgaccgttacagcgtttccgacatgatcaaccgcggcggcaccttcctgggctccgctcgcttcccggaattccgcgaagaacacatccgcgctgtggctatcgaaaacatgaagaagcgcggcctggacgcgctggtggttatcggcggtgacggttcctatatgggggcgatgcgcctgaccgagatgggcttcccatgcatcggcctgccgggcaccatcgacaacgatatcaaaggcactgactacaccatcggcttctttactgccctgagcaccgtggtggaagcgattgaccgtttgcgcgacacctcctcttcgcaccagcgtatctccgtggtggaagtgatgggccgttactgtggcgacctgaccctggcggcggcgattgccggcggctgtgagttcatcatggtgcctgaagtggaatatacccgtgacgatctggtggcagaaatcaaagccggtatcgcgaaagggaaaaaacacgctatcgtggccatcaccgagcacatgtgcgacgttgacgagctggcaagctacatcgagaaagagactggccgtgaaactcgcgccaccgtcctcggccacattcagcgcggcggttccccggttccttacgaccgcatcctggcttcccgcatgggcgcctatgcgattgagctgctgctgcagggccatggcggccgttgcgtcggcatccagaacgagaagctggtgcaccacgacatcatcgatgccatcgagaacatgaagcgtccgttcaagaacgactggctggattgcgcgaagaaactgtactaagttacgcgccggataaacaaaaggccttctcatggagaaggccttttttatggcggaaggtttattcgatatccagcgggtcttccgacaggatcatcccggtgttatcggcatacagatggtcgccggagaagaaagtcaccccgccgaaattgacgcgcacgtcgctttcgccgatgccttcgccagccgcgccgaccggaatagccgccagcgcctgaataccaatgtccagctcctcaaggtcgtcaacctggcgcaccgcgccatagaccaccaacccttcccattcattctggacggccagacgcgccaggtctgcgtcaattaacgcgcgtcgtactgagccgccgccgtcgatcaggagaatatgaccacggccattctgctcgagcagatcgtagagcaacccgttatcctcgaaacatttaaccgtaatgatctgtccaccaaacgacgaccgtcctccaaagttagagaacagcggttccacgacgttgacatcttcctggtagatgtcacaaagctcggaagtatcgtatttcataggcttaacgttcagttgctgcgagagtttttagtatatcccgcgaatcgcattgttggcaaaatcatcaattgttaattgatatttgtcagttaagccatcagcttactggcaataattccgataacaaacagcaggttggtcagtaaggcccctttgaccgtcttttcgagcattggccgcatcgccagcggatcggattcgcgcaggacgtagcgcgcctgtttcaccagcagcggcgtggcgagaataaacagccagccccaggctgaatgcagcgccagcaggttaaacagcgccagacacagcagggcgccgagcagcaggcaggcatgatagcggcgggcattgaccgggcccaggcgcacggcgagggtgttcttcccgttctgccggtcgctgtcgatatcgcgcagattattgatgttcagcacggcggtcgccagcagaccgcaggctgtcgccggcagaaaaatggccgcttccacattatgggcttgcagataccagctgccgaggacgctcagccagccgaagaaaacgagtactgagatatcacccaggccaatatatccatacggacgggtgcccaccgtgtaggtgatggcggccacgatagacaggcctcccagggcgaggaagccgatgaaatcgccgacgctctgccaggcggcgcacagcagcgccagaccaaacaggcagatgagtacgacggtgacgatcagagcgcgcttcatctgctggggggtaatcacccctttctgcatcccgcgcagcggcccgatgcgatccggtttatcgctccccttaaccgcgtcgccgtagtcattggcgaggttggaaagaatttgcagcaagccggcggtgatcagcgccagcagggcaacccagggatcaaaatggccctgctcccaggcaaggacggtgccaacaataatcgcggcaaatgccagcggtaacgttttaggacgcaggctttccagccacgcctgtgaacggctgatatcagtcatagttattctagccaataaaaatgggggcgatagcccccatcaacagtgatgaaaatgcattgcaccggattataggataaaacggctcagatcttcatctgccaccagaacatccaggtgtttactcacatattcggcatcgatagtgacggtctggccgttcatctcgctggcatcataggagatatcttccaccaggcgctccagcacggtgtgcaggcgacgcgcaccgatgttctcggtggtttcgtttacctgccatgcggcctgggcgatgcgcttgatgccgtcttcggtgaattcgatgttcaccccttcggtcgccatcagcgccttgtactgcacggtgatggaggcattcggctcggtcaggatgcgctcgaagtcgtgggtggtcagcgccttcagctcaacgcggatcggcagacgcccctgcagttccgggatcagatcggatgggctggccacctggaatgcgccggaggcgataaacaggatgtggtcggtcttgaccatcccatgtttggtggagacggtgcagccttccaccagcggcagcaggtcgcgctgtacgccttcgcgggagacgtccgggccggaggtgttgccgccgcgcttacagattttgtcgatttcgtcgataaagacgataccgtgctgctctacagcgtcgatggcttcctgcttcagctcttccggattgaccagtttggccgcttcttcttcaatcagcagcttcatcgcgtctttgattttcagcttacgcggtttctgcttctggccgccgaggttctggaacatagactgcagctggctggtcatctcttccatgcccggaggggacatgatttcaacgcccatcggcgccgcagcgagatcgatttcaatctctttatcgtccagctggccttcacgcagttttttacggaacgcctggcgcgctgcagacggttcctgcgacggctcagtctggccccagttgttcttcgccggtgggatcagcacgtcgagcacgcgctcttccgccagctcttccgcgcggtaacggttcttatcgatggactgcatgcgaaccattttgatcgccgcatcggtcaaatcgcggatgatggagtccacttctttaccgacatagcccacttcggtgaacttcgtcgcttcaactttgataaacggcgcgttggccagttttgccagacgacgggcgatttcggttttaccgacgccggttgggccgatcatcagaatgtttttcggcgtgacttcatgacgcagctcttcgttaagctgcatccgacgccagcggttacgcagggcgatagcaacagaacgcttggcggcgtcctgaccgataatgtgtttgtccagttcgctgacaatttcgcgtggggtcatttcagacatgggagatccttacgctttagaaggtaattcttcgatggtgtggaaatggttggtgtagatgcagatatcacctgcaatatccaacgctttctcggcgatgtcgcgcgcgcccatatcggtattttccaacagcgcgcgggccgcggcctgggcgtaaggaccgccggagccgatagcaatcaaatcgttttccggctgtaccacgtcaccgttaccggtgatgataagcgacgcgttttcgtccgcgacggccagcagcgcttccagtttgcgcaacatccggtcagttcgccagtctttggccagctcaacggcggccttcaccagatggccctggtgcatttccagtttacgttcaaacagttcgaacagcgtgaaggcgtcggcggtgccgccagcgaaaccggcaatcactttgtcgttgtacagacgacgcactttcttcacattgcccttcatcacggtgttgcccagcgtggcctggccatcaccggcaataacaacatggccgttacggcgaacacttacaattgtagtcacgagcagaccccttggttgcaaaagcggaacaggggccccgcgctgtccgcggggccgaatgcaattatagatgggggggattttgagggtttcaacccctggcggcgagacgaatgcagttcgcgtgtccagccatcttcaggcgggtgatcatctcgttggcgctttctttgcctttcaacgggccaataaccacgcggttccagccattgttagtggtaatgtgcgaagcaaacccttcgaaagccagctgagcgcggacggtttcggcctgctcggcgcctttaaaagagccgcactggatcatccagctacgatcgtctttcttctcggcggtggttttcggcgcttcttccacccgagttaccggcgccgcggcctgggtacgcggctgcgtggtattggtatgcgctggcgtctgcagcagatcctggtacggctgctggtttgacgcggtctgcttcggctgttgctgctgaaccggcttcggctgctgaacgcgcggcggctgctgttggacggtctgcgcctgagtctgcgcccactgttgctgctgcgcctgctgctgttgctgcgctaaacgctgacgctgaagcgtctgctggcgctgcgccggcgtttgttcgttccacggcacttcggtcagctgggtcggctgctggcgcatatcggcctgcatctgggcgagcagctggcgctgctcgtcggtcagctgttccggtttcatgacttcgccaccggcggtcggttcggtcggcgcgcggacgccaggctggcggctttccagctctttaatatagcgccagcgctcttccggtttgggcggcaagccgttgccggcggcctggcgattttgcatcgcttccgcttcttctttcttatgatgcgtaatgaaatagaggccaccgataaaggccaccagcacagccgccgcgatcgccaccatcgccggtgaaatcgccggaaggctgctttgcttattccttgagcttcgggtcgtgctctttttgcgccgcgaagaagccggttggctgcggcgtacataatctcgttgtgccactatcgtttcgctgtcttatattcgttcgtcagcccgccatgttacttaagcggcgggcctttgaccagaagagcaggcccgaaagcctgatggttatcgtctgattttttgcgtactgccgcgaacaatcagttcgcaatcgagcagacgcgagccgctgttcacgttatgcccctgcatttgctccagtaatagcagcattccttcacggccgatatcaaaccgtggctgtgaaaccgtggtcaacggcggatcgcaaaattcagacaacgcgatgttatcgaagccgacaattgacaggtcgtccggcactttcagaccgcgacgttttgccagcgataaggcgcccagcgccatcacatcgctatggcaaaagactgccgtgggcggcaccggctgcgccaggagctgctccagcgcattggcgccggcttcgaaggtaaagttgccgcgagcaatatagtgcggatcgacggtgataccgctgcggcgcagcgcctgcacataaccctgcaggcgataatggcacaacggcatatcttccgggccggcgatacagccgatacgctgatgtcccagctcgtggagataatttaccgcgttaaaggccgccgtcaggttatcgatatggacggtgggcagctccagctccggcgcaaactcattcgacatgaccattggcggcaaattgcgctgctcttccacgctggcgtcaaacggcaagcgcgagctgagcagcaccatgccgtcgatctgcttggtgatgataaggtcgataaaggttttttctttctgattctggtgggcgcaatcgccgattaacaccagatagccgtgctcggcggcagtgacttcaataccgcggatcacttcactaaagaagggatcgcagatatccgggacgatcacgaggatcgttcgcgattcgttgcgcttcatattgcgtccgagcgactgcggtaaatagccgacttccagcgccgcctgctcgacccggttacgggtggcttgcgacaccttatcagggttcatcaacgctcgggacacggttgccgtggaaacgtttgccttgagggcgacgtctttcatggtggcggcaaccacttgttttttgggcttcacctggtttctcctcgctgaatggcgctggcatttcccttgggcgctaactgctgcatcatttttatcagatagtcgcggcagtgagttacagaattttcatgaaaaacgtgatgcttgttaaatttttcgatccggctcgcaagagaagccttatccttcaatcggatcgacatccagcacccacttcacttttctcgcctccggaagcgtattgatcagcgccagcgtaccgctaacgatatgttgcagacgcacccgcgaaggatgctgcagcaatatttgccagcgccagcggccgccgcgctttggcgccagcgccggaaccggaccgagcacccatagcttttcgtcggccagcgggctggcctgcagcagattgcgcagctgttgtaaaaacagcggcgcctgctggttgttatggtcttccgcacgaatcagcacatggctggtccacggcggcagctgcatcgtctgccgctctgccagcgcctgttcggcaaaggcgtcgtagcctttatacagcagggtctgcagtagagggtgttccggatggtgggtttgaagaatgacctcgccctgttttcctgcccggcccgctcgtccggagacctgggtataaagctgagcgaaacgctctgcggagcggaaatcagcggaaaacagcgccccgtcgacatccagcagggagacgagggtgacgtccgggaagtggtgccctttggccagcatttgggtgccaatcagaatacgcgccccgccgcgatggacggcggcgagatgctcctccagcgctcctttgcggctggtggtatcgcggtcgatacgcgagataggcacctcagggaacagcggcgccagggcctgctccagctgctcggtgccgatccctaccggcaccagatgcgtggagccgcaggaaggacactggcgcgggattgggcgctggctgtcgcaatggtggcagcgcagatggtgctgcgcctggtgcaacgtatagtaactgtcgcagcgcgggcattccgctatccagccgcaatcgtggcacagcagcgctggcgcaaagccgcggcggttaagaaacaggatcacctggttatccgcttgcaggtgctggcgcatacggctaatcagcgcgggagacaggcccgcctgcagcggttgccctttgagatcgagcacgtgctgctgggccgggcgcgcattgcccgcgcgtttgcttaaggttaactggcggtatttaccctggcggacgttatgcagagtctccagcgccggcgtcgccgagccgagaattatcgggatctgctcgctgtgggcgcgccataccgccaggtcgcgggcatggtagcgccagccttcctgctgcttgtaggagctgtcatgctcttcgtcgatgacgatgacgccgagatctttaaatggggtaaacagcgaggagcgggtgccgatcacgatggccgcttcgccatttttcgccttcagccaggccgagagacgttcgctgtcattgagcccggagtgcagcacttccaccggcgcgttaaagcgctggcgaaatcgggcgatggtttgcggcgtcaggccgatctccggcaccatcaccagcgcctggcgcccctgcgccagcacattctccagcacgctcaaatagacttccgttttcccggagccggtaatacccgccagcagccaggcggagaaacgatcggcggcgctgtggatcgccccgacggcggtggcctgctcggtattcaggcgcaggcgttcgccggcaaccgaatacgcgctgcgccagtcggtgagggcgggcgcttcgcaggccagctccgccagccctttaccgcgcagcgcctgcagcgccgcttcattgaattccagttcgccaacctgatgacgccagattttaccctggcgcagcgccgccagcgcctgctgctgcttccgggagcgtttcaggccgttaaggtcgacaacctgcccctgctcggtggcgaaccagtaccacagcggcgtggcgctggcgggtttgccctggcgcagcataacgggtaatgcatggaacagcacatcgccgatcgggtgatggtaatactcagccgcccacatcagcagtcgccagacagtcgtggagaagaccggctcgtcgtccagcgcttcggcgaccggttttagctcatccagcggcagttcgctgcgctcgctcaccgccgcgacaatgccgatccgctcctgtttgccgaacggcacccgcacccgacagcccgctttgaccgccatgccttcaggcagcaggtagtcaaaagtgcgcggtagcggaacgggtagggcaacgtgggcgacggacatgtcatcttcctgacttgaaatctggcgggatagtatacacattacgataaggcggcgcggatcagtttgcatatgctggtcaaattctgtatgattcgccgcctttgatgcgctttatatcgcattgaagattgaccattaccgcgtgcttcacgctgtcagcagcgtagaaggcgacgggaaattactaatatcgcgtggtgtctggcgttagggctggaagagcgacgcggccttaactgaggttctcccatgaaaaaaggtattcacccaaattacgacgaaattactgctacctgttcttgcggtaatgtcatgaaaatccgctccaccgttggtcacgacctgaacctcgacgtgtgcggcaaatgccacccgttcttcaccggcaaacagcgtgatgttgctaccggtggccgtgttgaccgcttcaacaagcgcttcagcatcccgggcagcaagtaagttgccagaagaagccgcctcagggcggcttttttgtctctcccgcctgcctgggcgggaaagaaaaaagggcggaagattattccgccctttttatcgtctcagtattcccacgtatccgggtcgattcccagttcacgcataatcgctttcgccgcttccgggatctcatcgctgcgctctttacgcaggtcttcatcgttaggcaacggttgtccggtaaaggcatgcagaaacgcttcgcacagcagctcgctgttggtcgcgtgacgcaggttattcacctgacgacgcgtgcgttcatcggtgaggatttttaacaccttcagaggaatggaaaccgtaattttctttacttgttcactcttcttaccgtgctcagcgtatgggctgatatattcgccgctccattcagccatgagataccttaatcctctgtttattagtgaagggccagaatattccgcccgggctataattgcgcgtagtttaccgtatgcgcgggctttctgacatgagataagccgccgacgacgtgcgctaatgcatataattttaacggctatttgcactttgctcaatctatacgcaaagaagtttagatgtccagatgtattgacgtctattgtgacaatgattactctggagcctgacttttcaccgattcagcccaggaacttcccaacatgacgcgtaaacaggccaccatcgcagtgcgtagcggtttaaatgacgacgagcagtacggttgcgttgtcccgccgattcacctctccagtacctataacttcaccggctttaatgaaccgcgcgcccacgactactcccgtcgtggcaatccgacgcgcgatgtggtgcagcgcgccttagcggagctggagggcggcgccggcgcggtgctgaccaataccggaatgtcggcgatcctgctggtgacgacagtgttccttaaaccgggcgatctgctggtggcgccgcacgactgctacggcggcagctaccgtctgttcgacagcctggcgaagcgcggctgctatcgcgtccagtttgtcgatcaaagcgatgagcaggcgctgcgggcggcgctggcggaaaaaccgaagctggtgttggtggaaagcccaagtaatccattgctgcgggtggtggatattgcgaaaatctgtggtctggcgcgtgaggccggggcaattagcgtggtggacaacaccttcctgagcccggcgttgcaaaacccgctggcgctgggcgccgatctggtgctgcattcctgtaccaaatacctcaatggtcactccgatgtggtggccggggtggtgattgccaaagatccggcaactgtcaccgaactggcatggtgggcgaataatattggcgtcaccggcagcgccttcgacagctatctgctgttgcgcgggctgcggacgctgtctccacggatggaagtggcgcagcgaaatgccctggcgatcgttgagtatctgaaaacccagccgctggtgaaaaagctgtatcatccatcgctgccggaaaaccaggggcatgaaattgcggcgcgtcagcaaaaaggttttggcgcaatgttaagcttcgagcttgacggtgacgagcagacgctgcgccgttttctgagcgggctgtcgctgtttacactggcggaatcgctggggggcgttgaaagcctgatttcccatgcggcaacgatgacgcatgccggcatggcgcctgaagcgcgtgccgccgccggaatttcagaaacgctcctgcgtatatcgaccggtattgaagatggtgaagatttaattgccgacctggaaaatggcttccgggcagcaaacgaggaataaagatgagtgtgattgcgcaggcaggggcgaagggtcgtcagctgcacaaatttggtgggagtagtttagcggatgcgaaatgttacctgcgcgtcgcggggatcatgaaggagtattcgcaggcgggggatatgatggtcgtctccgccgctggcagcaccaccaaccagctgatcagctggcttaagcttagccagagcgatcgccttgctgcgcatcaggttcagcagtcgcttcgccgctatcacaccgagctgattggcggtctgctggagcctgcggcggcggatacgttgatagccgcctttatccacgaccttgagcgtctggctggtctgctggacggcggggtttccgaagcggtctatgcggaagtagtcggccatggggaagtgtggtccgcgcgcctgatggcggcggttctcaatcagctgggtatggaagccgcctggctggacgcgcgcgcgttcctgcgcgcggaacgcgccgcgcagccgcaggtggatgaaggattatcctatccgctgctgcagcagctgatggcgcagcatcctaacaaacgtctggtggtgaccggctttatctcccgtaaccaggccggcgaaaccgtcctgctgggccgtaacgggtctgactactctgccacccagatcggcgcgctggcgggtgcctcccgggtcactatctggagcgacgttgccggggtgtacagcgcggatcctcgcaaggtgaaagacgcctgcctgctgccgctgctgcgtctggacgaagccagcgagctggcgcgcctggccgcgccggtgctccatgcccgcacgctacagccggtttccgccagtgatatcgatctgcagttacgctgcagctacacgccggaacagggttccacgcgcattgagcgcgtgctggcctccggtaccggcgcacggattgtcaccagccatgacgacgtctgcctggtggagttccaggtgccggccggtcacgatttcaaactggcgcataaagagctggacgctctgctcaaacgcgcccagctgcgcccgttagccgttggcgtccatgccgaccgtaagctgctgcagttctgctatacctccgaggtggccgacagcgcgctgaaattgctcgatgaagccggtctgccgggcgagctgcgtctgcgtcagaagctggcgctggtggcgatggtgggcgcgggagtcacccgtaacccgctgcactgccaccgtttctggcagcagctcaaagggcagccggtggagttcacctggcagtctgaagaggggatcagcctggtggcggtgctacgcgccgggccgacggaaagcctgatccaggggctgcatcagtccttgtttcgcgccgaaaagcgtattggcctgatgctgttcggcaaagggaacattggttcccgctggctggagcttttcgcccgtgaacaaactacgctctcggcgcgtaccggtttcgagtttattctcgccggcgtagtcgacagtaaacgcagcctgctgaattacgacgggctggatgccagtcgggcgctggctttcttcaacgatgaagcggtggagcaggatgaagagtcgctgttcctgtggatgcgcgcgcacccgtatgatgatttagtggtgctggacgtcaccgccagcgaacaactggccgaccagtatcttgattttgccagccatggcttccacgtcattagcgccaacaagctggcgggcgccagcagcagtgataaatatcgtcagatccacgacgcgtttgagaagacggggcgccactggctatataacgccaccgtgggcgccggcttgccggtgaaccatacggtgcgcgacctgatcgacagcggcgatactattctcggcctgagcggtatcttctcgggaacgctatcctggctgttcctgcagttcgatggcaccgtgccgttcaccgacctggtggatcaggcgtggcagcaggggctgaccgagccggatccgcgcgtcgatctgtccggtaaggatgtgatgcgtaagctggtgatcctcgcgcgggaagcgggctatgacatcgaaccggatcaggtgcgtgtggaatcactggtgccggcgcactgtgaagaggggtcggtcgatcacttctttgagaatggcgaagagctgaacgagcagatgctgcagcgtctggaagcggcccgcgagatggggctggtgctccgctacgtggcgcgctttgatgccaacggcaaagcacgcgtcggtgtggaagcggtacgcgaagagcacccgctggcggcgctgctgccgtgcgataacgtgtttgccatcgaaagccgctggtatcgcgataacccgctggtgatccgcgggcccggcgccgggcgcgatgtgaccgccggggcgatccagtcggatattaaccgcctggcgcagctgctgtaagcgtcgcgttatactcttgaaccagtgaggccactatttgcgttacgcgccctgcggaatacagggcgctctgcgcaaacgcgggtctgtttttcagccatattgtaaaccgtcggctggccgcaaggtctggtagaaaggcgttctcttctacagtgccggcaagccggcagaccattttctgattctcttcctgcgtccaacgctgccatgaattttgccaccagccatgatgggttttcccctgtagctgccacggagccgggctggctgggttccttatctcttcttccacataccatagatcgccttgccgctgacgaaaaagcggcgcccaggcaacgatcgccgcgccgcgtaaaaagcattcatgcgcaataacgtgcgttttcacctctggaaaccgctggctgagcagtttgaaatgaccgtgcgcggcgataaccgggcgcaatatattgccgcgggcatggcgcttttgcattgcgctgccgtactggatttcatcgaactgactgcgttgtaaaaagcgcatttcagtgagagaaatacgttgaataatatcgtcagtctcctccctgtcggcttgtccgccgcgccagtgatagcgtaatgattcgcctaccgcgaaaggagtgaaattagaggtaaaatgaataacattaccgcgcacggcatcaaagcttaataaaaaatagagcttttgcccggcggcattaccctggaatggcgctatcaacggtacgctgcaaatacgtcgtggggcttcaattggggcgatgtgtgggaattttggcgtccagacctttttacagtggcggcactgaaggcgttgcgtaccctgcggattgcggccgtagcgaataatatcccgctgatagcataccgggcaaaaatagccgtagcggcgggcatgatccgtcagataagccgccagccaggggcggaattcccgttcgttaaacagggggggatagctgccgcaggctgcgcagtagagcgccgggtagcccagccgaaaattcgggaaatgatactcagccgcagacggtaaacctaaattgcggcagccaaaagttttacaggcgttaatggtaaagagagtatccactggcaggtcaataccaacgatttttacaggtcgttaattttgtcctgctcaggttgcatacaactgtgaatgctctcacataaaaaagtctttcagaacgtaacttagcggttctttatcactctgaaaggaactccgatgaaactaaaaacaatgagcgcagcacttctgttgactttgcctttctgggcctgcgccaaagatgtcaccataatttataccaacgatcttcatgcccatgtcgaaccttataaagtgccatggatagcggatggtaaacgagatattggtggttgggcgaatatcacgacgatggtgaaacaggaaaaagcgaaaaataacgcgacctggttttttgatgccggggattattttaccgggccttacatcagtagcctgacgaagggcaaagcgataatcgatattatgaatacgatgtcctacgatgcggtgactatcggtaatcatgagttcgatcacggctgggataatacgttgcttcagcttagccaggcgacattcccgattgttcagggcaatattttttatcagaacagcgataaatcgttctgggataagccctataccattatcgaaaaagatggcgtgaaaattggcgtgattggcctgcacggcgtgtttgcttttaatgacaccgtttctgccgcgacgcgagtgggtatcgaagcgcgcgatgaggtgaaatggctacagcattatatcgatgaacttaacggtaaagtggatctgaccgtggccctgatccatgaaggcgtcccggcgcgtcagtcgagccaggggggaaccgatgtgcgtcgtgcgctggataaagatattcagactgcgggtcaggtgaaaggcctggacgttttaattaccggccatgctcacgttggcacaccggagcccattaaagtgggtaatacgttgattctttctaccgatagcggcggcatcgatgtgggtaaactggtgctggattatcaggagaaaccgcaccaattcacggtgaagcactttgagctgaagacgctttatgccgatgagtggaagcctgatccgcagacaaaacaggtcatcgacggctggaataagcaacttgatcaactggtgcagcaggtcattacacaatcgcccgttgaactgacccgtgcgtatggcatctcttcgccgttgggcaatcttgccgctgacgccttgctgttggcagcaggtaggagtacgcagatggcgttaaccaactcgggcgggatccggaatgagatccccgccggggcggtgagcatgggcgccgttatcagcaccttcccgtttcccaacgagctggtcaccatggatctaaccgggaagcagttgcgtagcctgatggagcatggcgccgggttgagcaacggcgtgctgcaggtctcccggggactggaaatgaagtatgacagcagcaaacctgtgggccagcgcgttgtgttattcaggctaaacggtaaaccgattgacgatacgacggtttaccatattgccaccaacagcttccttgcagatggcggcgatggttttgtcgcgtttaccgaggggcaggcgcgtaatacctccggcggctattacgtttcaaatgcggtcgtagactatttcaaagccgggcaaaagataacggatgagcagcttaacgggcagcgcgttgtcgatgtgaagaaataagtttttaaggccgggcagtcagcccggccttaagcgatcagtgggccgcaaataccgccctggcggcaaacaggccgttgagggccgccgggaatccggcatagactgccatctgcatgatcgcttccgtaatctcctcttgcgtcaggccgacgtttaatcccgcggcaatgtgtactttcagctgtggctcggcgttacccaacgccgtgagcgcggcgatggtggcgatttcccggctgcgtaaatcgagccctggcctggcgtaaatatcgccgaaggggaactcaatcagatagcgggcgaaatcgggggcgatatcccgcaggctgtcgacgacggcttccccgcccttaccatccacccgctgaagcatttcctgaccgatgatataacgttcgctggacatcgttttttcctctctgtgatggtgcgttaagaggaagggtagggaagtgtgccggacttgagtaatacccttttcgtgataccttttcagtatgacaacttcaagattacattctctggatattcgcctgctgcgcgcctttgccgtggtagcggaggaaaataacatcagccgggcggcgcagcggttatttatctcgcagccgccgctgacccgccatatccgccatctggaagcgcagctgggggtgacgctgtttcagcgccatagcaaaggcctgatcctgaccgacgcgggtaaagaggtgctggagatgattcaacctctgctggcgctccaggaacgcacgctggcggcattgagtgagctcgccgcccactcgccgcaggctctacgtctgggcgtgacgacggccttcgaacagggcattttcgccgccgttgaggctgcgctgagcgaacatacccgcgcgttgcatatcacccgccacgcctcaccggcgctggctcagcaggtacgcaaaggcaaactcgatgcggcgctggtcgcgttgccgctcaatactgaagggctgcacctgcacccattgccgtatcatgagccgctcattgcggcattacctgcctcctggccggaagccgccaggccagggctgacgttaagcgcgctcaatcatcggccgctgttctggtttaaacgcgagcgtaatcctggtttctttgactacacgcgccgtattttcgaccgggctggctatgccccgacgtatgtggaagagccggccgagcatgatgtgctgctggcgcgtattgcgcgcggggaaggcatgatcctgctgccggcgtccttttccgcgattcagcgtcagggggtggcgttctgcccggtggctgagggcgacgcgatgccgttaagccttggggtgatttatccgcctcaccaggcagagtccgtgcagcaatggctttctctgctggatggcattctggcgactggctagtctcaggctgactcgcgagccaccttatattgcccaccgagccgcttcctgagcgtggccaggtgatcggaagatgaacttttttcaagtaggtgacctattcctcactctttacgcagatttttctattgacgcccgcgcgcttttccgtcatttttacatctggacgtctaaacgtatagaagttcgcaatataacagccattacatgcgattgatgaggtaaggtatgagcttttttcacgccaatcagcgggaagccctgaatcagagcctggcggaagtccagggccagattaatgtgtcttttgaattctttccgccgcgcaccagtgaaatggagcaaaccctgtggaaatccatcgatcgcctgagcagtctgaaaccgaagtttgtttcggtaacctatggcgcgaactctggcgagcgcgatcgcacccacagcatcatcaaaggcattaaagagcgaaccggtctggaagcagcgccgcacctgacctgtatcgatgccagccgcgatgagttgcgcactatcgctcaggattactggaacaacggtatccgccatatcgtcgccctgcgcggcgacctgccgccgggcagcggtaaaccggatatgtacgccgccgatctggtgacgttgctgaaagaggtaggcgattttgatatctctgtcgccgcgtatccggaagtgcatccggaggcgaaaagcgcgcaggcggatttactgaacctgaaacgcaaagtagaagcaggggccaaccgcgcgatcacccagttcttcttcgatgtggaaagctacctgcgttttcgcgatcgctgcgtctcggcaggcatcgacgtggaaatcattcccggtatcctgccggtctccaactttaaacaggcgaaaaagtttgcggatatgaccaacgtccgtatcccggtgtggatgtcaaaaatgttcgaagggctggataacgacgccgaaacccgtcaactggtgggggcgaatatcgccatggacatggtgaagatcttaagccgggaaggggtcaaggatttccacttctacaccctgaaccgcgccgagatgagctacgccatctgccatacgctgggcgtacgcccggcctgagttttcattaacgtttagtgcgatggcgaagccggtattcgccatcgcttttttttgcccaaaacgctgatacaggtcaggggagagcagaagataaagcgcgtatagtgccagcctgataattgacagggatgggttatgcaatggcaaggaagagcgatccactggcgtttggtgggttggcgttattaacgctgatctggagctttagctggatcgcgatgaagcaagtgacgagctatatcggcgcttttgacttcacggcgctgcgctgtatttttggcgccgtggtgctatggatagtgatgttgatccgcggtaaagcgctcaagccgacgcctttcggctacaccctggcaatcgcgttattgcaaacctgtggcatggtcggtctggcacagtgggcgctaatgagcggtggcgccggtaaagtggcgatcctgagttataccatgccattctgggttgtggtgatggccgcgttattcttaggtgagcgcatgcggcgatggcagtatatcgccatcggggtggcatgcgtgggcctgatactcgtacttcagccttggcaactcgactttacctccctgaaaagcgccttgctggcgatcctctccggcgtgagctggggggcaggtgcgatcgtcgcgaagcgtatgtatacccggtatccgcaggttgatttgctggcgctaacgacatggcagatgctatatgccgccgtagtaatgagcgtagtggcctggctcgtcccgcaacgggcggtagactggcagcccgacgttttctgggccctggcttacagcgcaatccttgcaacggcgctggcctggagtctgtggctttttgtactgcgtaatttaccggcaagtatagccggcctgagtacgctggccgtaccggtctgtggcgtgctattttcctggtggctactacatgaaaatccaggaaaggtggaaggttgtggcattgcgttgatagtactggcgttggcgatgatcagtatcaagagacgaggggcatagcctgctccggcctgcagagatgcataaaaaacacccggcatcagccgggtgttttgctctggtttattcccattcctgcaggaagcgctgaccatactggtcggccaccagcagcgcggcgtagacctggtcggaatcaacgccgcccggcatattgtgaatggtttcgccttcagcgcaggcggcttccgccaccagacgcattttggtcgggatatcacctttgatatccagctgcgccagggtgatcggcagcccaacgctgtggcacagcgcggcgacggtctctatttcgtccaccggcgcattttccagcaccagctgcgtcagtgttccgaacgccactttttccccgtgataatagtgatgggcgtcagggatggccgtcatgccgttatgaatcgcgtgcgccgccgcgagaccaccgctttcgaaacccacgccgctcagataggtgttggcttccaccacccgctccagcgccggggtgaccacgtgctgttcggcggccagcatcgctttttcaccctcttcgagtaaggtgttgtagcatagctcggccagcgccagcgccgcctgggtgcacttcccgcccgccatggtggtggcgccgctacgggagcaggcgcgggcttcgaaccaggtagccagcgcatcgccaatcccggcggccagcaggcgggccggcgcgccggcaacgatctgcgtatcgacaatgaccatgttggggttgcgcggcagcatcaggtagctgtcgaattccccttcgtcggtgtatatcaccgacagcgcgctgcacggcgcatcggtggaggcgatggtgggggcgatcgccaccggcacattcataaagtgggccagcgctttcgcggtatccagggttttgccaccgccgatccccagcacggcggtgcacttcgcgttgccggcgatatcgcgtagacggttgatttcattatgcgaacactcaccgccaaacggcgcgatttcggccgccaggccagcgtcggccaggcttttacgcagcatctcttccgcaaaccccaggacgaacttatcaccgaccaccagccagcgctcggccagcggtttcagatagtcgccgaggcgcttgatggcgcctgcgccctggatatatttgcctggtgattgaataatgcgatccatttcgattcctcctcgatgaccgtgacgccgcccgcaggcggctcgcggatccggttacagattcagcgtgccaaaggcgttattccagtcctgttcaaacttctctatggctgactctaccgcaggggtgccgagcatttgttgcgctacatctagtggaagggtgattgcttcgcagccagccagcagacaatccagcgcctggcgtggcgttttgaagcttgccgccagaactttgctctcgggcgcatgcatttccagcagggattgcagctcctgcaccatgcggatgccgtccccgccctgggcgtcgacgcggttaacgtaaggcgcgacgtactttgcgccggccagcgcggccagcaggccttgcgaagcgctgtagacggcggtgccaagggtcgggatgccttctttcttcagcagtttgatagcggcgagcccttcggcggtgaccgggattttgaccacaatgcccggcacggcattgctcagacgtttggcctcttccaccatgccctgcgcgtcgcggctcatggtctgcgcgaagagggtgccctccggaccgacggctttttgcaggcgcggcagcacatcccagaccgggactttaccggcggcgataatgctcgggttggtggttaccccggccagcgggtagatgcgggccaggcgttccacttcggcgacgttggcggtatccagatagagttccattgtgttttcctcaatgcttaattcggtgctgtcgttgaggtaagcatacggctttcgttcgaaggatcgccagatgacaaatttgccaaaaactggataaatgtacgcatcgtgattaaggatgatttagatcacatttatcggcgctggctgggatgggaggttactatagcgcgcacaaaagtcaggtttaacacacaaaaatctagttttttaccggggatgctttttccgtcagctggctatggtactggcggcggtattcagacggcgagcgttccgtagttttgcggaacaggcggcagaagtagttgctgtcggcgaagccgcaggcgtgggcgatgtctttcactttcatatcgtggcccttcagcagcatacgggcctgttcgagacgaatatggtttagatattcattgaagcccattggcccacatttctggaacagatgggaaagatagttgggagagaggtagaacgcctgggccaccgattcccggctcagcggttccgcataatggatgtccatatattggcggatcgcttcaaacaacgcctggctgcgcgaggaggtttgcgcctggctgccgagaagatcatggcagtggctgagcaggctgacgacgatgctgcgggcggtttgctgctcctgcggttgcatccggagttcattgagcgcctgcagcagaaatgatccgacgcgcggcccgcggcgcagcgcctgccgcttgtcgacaacagttatcgccttgccattccagtgctgcagcgagcactccagctgctgcttagcgaacaggatgcttaacagcaggcaaggcgcttgccactgcgggcagttccagctatcgccaggaatatagagcacgtcgttggcttcgaggggaggggcgttatcgccgagcgcctggtcgggcaactgcccatcgaggaggatattcagacggggaaaatccacctgcaccaccggctcagcaggcgagcgcgtctcgccggcgaaataaacccggccgaggctggtctgcttttttagcaatgcatcaataagttgattgatatcgttgtccatcattcttccgttcagcgcatcacccttttcatcataccggacattattccagcggtaaaagcgcttgcctgtcgctcttgcctcccagacaaggtatgttatatcgtaacaatttgtcgccattgatagcaaactcaggagagagtaatgaccagaaagatccccctgctggccttaggattcggcatggctttagccagcgcccaggcgttcgcccacggcaaccatagccatggcccggcgttaaccgaagtggagcgtcaggccagcgaaggcatttttgcggataaagatgtgcaggaccgcgcgctgagcgactgggaaggcgtctggcagtcggtgaacccgtatctgctcaacggcgatctcgatccggtgctggagcagaaggcgaaaaagcccggcggcaagagcgtggaggagtatcgcgcctattataagaagggctacgccaccgatgtggagcagattggcattgaagatgacgtgattgagttccacgttggccagaccgtcaatagctgcaaataccgctattcaggctataaaattctgcattacgcctccggtaagaagggcgtgcgttatctgttcgagtgccagcagggcgatgccaacgcgccgaaatttgtgcaattcagcgaccatatcattggcccgcgtaaatcacagcatttccatattttcatgggcaatgaatcacaggaggcgttgctgaaagagatggataactggccgacctattatccgtatgcgctgcataaagaacagatcgttgatgagatgctgcaccactagaacgggcggaaaacccccggccgggcggccggggagagatagattaaccggtgttacgcataccggcggcgacgccggcgatggtgaccatcagcgcttgttcaacgcgcggatccgggtccttgccctcttcttcagcctggcgtgaacggtgcagcagttccgcctgcaggacgttcagcgggtcggtatagatattacgcagctggatagactcggcgatccacggcaggtcggccatcagatgggagtcgttggcgatggccagcacgacgttgatatcggcagccagcagcttgcgcagctcggaacccagcgcccacagctccggcttcaccaggcgctgatcgtagtactccgccagccacaggtcggccttcgagtaaaccatctccagcatgccgaggcgggtagagaagaacggccagtcgcgacacatggcttccagttcactctgttttccaccttcgaccaccttctgcagcgcagcgccagcgcccagccaggctggcagcattaggcggttctgggtccaggcgaagatccacggaatggcgcgcagcgactcgacgccgccggttggacgacgttttgccggacgcgaacccagcggcagtttgcccagctcctgctccggggtcgcagagcggaagtaagggacgaaatctttgttttcacgcacgtagccgcgatacatcttgcacgacacgtcggacagctcggccatgatgtcgcgccattctgctttcggctccggcggcggcagcaggttggcttccagaatggcgctggtatacagcgacaggctgctgatggtgacttccggcaggccgtacttaaagcggatcatctcgccctgctcggtaacgcgcaggccgcctttcaggcttcccggcggctgcgagagcagcgcggcgtgggccggcgcgccgccgcggccgatagagccgccgcgaccgtggaacagcgtcagttcaataccggctttttcgcaggttttgatcagcgcgtcctgcgcctggtactgcgcccaggaggcggccatcacgccggcatctttagcggagtcagagtagccgatcatgaccatctgcttgccctggataaagccgcggtaccagtcgatattcagcagctgggtcatgacgtcgttggcgttgttgaggtcatccagcgtttcgaacagcggggccaccggcagagcaaagccaatcccggcttctttcagcaggagatgaaccgccagcacatcggacggcgttttcgccatcgagatcacgtaggcggcgatcgatccgcgcggcgcctcggcgatcaccttgcaggtgtcgagaacttcacgcgtctcttcgcttggctcccactggcgcggcagcagcggacgtttggaattcagttcgcggatcaggaaagcctgtttgtcggcttccgaccagctttcgtagtcgccgatcccgaggtaacgggtcatttcacccagcgcttcggtatggcgggtgctttcctgacgaatatcaatacgcaccagcggtacgccgaaagacttcacgcggcgcagggtgtcgagcagctcgccgttggcgataatgcccatgccgcaggcctgcagcgatttatagcaggcgtacagcggctcccacagctgctcgttctgagtgatcagtcccgccggtttcggcagcttctggcctttcaggcgcgcttccagccaggcctgggtctccatcagctgagagcgcagttttttcatcagataacggtaaggttcctgagcgccctcggcgccagccagggcgcgcagctcgtcggtacactccaccatcgacagctcggagatcagcacctgcacgtctttgaggaacaggtcggtcgctttccagcggctgagcagcagcacgtggcgggtgatgtcggcagtcacgttcgggttgccgtcgcggtcgccgcccatccacgaggtgaaacgcaccgggacgaagtccaccggcagctgatagccaaggttggcttccagctgttcgttcagctcgcgcagatagttaggcaccccttcccacaggctgttttccaccaccgcgaagccccatttggcttcatcgaccggggaagggcggtgcttacgaatttcatcggtatgccacgactgggcgatcagctggcgcagacggcgcattagctgatggtgctcgtagtcagcgatatctttgttgtccaactgcttaaggcagttgttcacttccaccattttatggatcagcgtccggcgggtgatctcggtcgggtgggcggttaacaccagctccagagacagcgattccaccgcttgtttgatggtctcttcgttgagattgggttggtctttgagctttctcagggtacgcgcaatgacttccggattgctggccgcttcgccattggccgaaatgctgtggtactgctcagcggtgttggccagattcagaaactggctgaaggcacgggccaccggcagcagttcgtcgtttgacaaattctgcagcgtggtcagcagctcctggcggttagcttcgttgccggcgcgtgaagatttggacaacttacggatagtttcgacacgatcaagaatattttctcccaatgcatccttgatggtatcgcccagcaccttgccgagcatactgacattactacgcaatgcggaatattgttcgttcatgttaccccagacaccccatctcattttattttgttatatccgctgcgctggaacgtgagcaacggataagcaacccgtcttttataaagccacgtaaatacccccacgtcaattactgcgaaatcgcttcagcaaacgagtaaatcgccgtaatttgcgaaatttaattcagggagcgctggataagtatcgcttatggaaatgtgacgatcgtcaccgttccgccccgggagaacggggcggaaaaagagggcgattttagtgccagcagaagtgatgaaccacctggctaatcagctcccgggtcggcttgataaagcgcgtctccagatactcgtcaggctgatgggcctgattgatggagcccgggccgagaaccagcgtcggacatagcgtctggataaacggcgcttcggtgcagtagttcaccacgtcggtctgcgcgccaagcagtttctcgaccacctgcaccagcttatggtccggcgggcactcgtagccggggatcggcggatgcagctcagagaccgtcaggcggcccggccagcgttcgctgaccggggccagcgcctcgcccaacagaccattaagatcgtttagggtcatccccggcagcgggcggatatccatatgcagttcacagcaggcgcagatacggtttgaggcatcgccgccatggatagcgcccaggttgagggttgggtaagggaccgtaaacgcctcgaagtgatagcgctctttaagcagatcgcgcaactgcataatccggccgatggcgtcgtgcatcagctcaatcgcgttgaccccgcgcgccggatcgctggagtggccggactggccctgaatacggatcgcgttggacatatggcctttatgggcgcggatcggctgcagggaggtgggctcgccgatgatggcgcagtccgggcgcagccgggtggtttcggcaaagtagcgcgcgccggccatgctggtctcttcgtcggcagtggccagaatatacagcggctttttcagcgtggtgacgtcgacatcgcgcagggcgtcgagaataaaggcgaagaagcctttcatatcggccgtgccgagaccgtagagcttgttatcgtgttcggtgagggtgaacgggtcgcgcgtccagcggccatcatcgaacggcacggtatcggtatgcccggcgagcagcaggccgccggcgccgtgtccggtgctggccagcaggttgaatttatggcgcgtatccggcaccggctgtatctcaacattgaagccgagatcgcggaaccagcctgccagcaaattgattaaagactcattgctttgatcgagagcctcttcagtcgcgctgatggacggtgtggcgatcaacgcgcggtaaatctcgataaagggcggtaaattgtttttcattgttgacacaccttgggtcgtgatagtatcaatattcatgcatttattgtgaataaaaatacaatatcgttgagcgtaagaaaacccatcgaatgtaaggagatgcgcttccaatgttaaatacgctgattgtgggtgccagtggttatgccggcgcagagctggtgacctatatcaatcgtcatccgcatatgaacataaccgctttgacggtctccgcgcaaagcaatgatgcgggaaaattaatttccgacctgcatccgcagctcaaaggcattgtcgatatgccgctgcagccgatgtccgatatcagcgaattcagcgctggcgtggacgtggtgtttctcgccaccgcgcacgaagtgagtcacgatctggcgccgcagttccttgccgctggctgcgtggtgttcgatctctccggtgccttccgcgttaacgatggggcgttctacgaaaaatattacggtttcactcatcagcatcccgacctgctcaaacaggcggtgtatggtctggcggagtggagcgcggatgcgcttaaagacgcgcagttaatcgcagtgccaggctgctatccgacggcggcgcagctgtcgctgaagccgctgattgaggccaatctgctggatctcaaccagtggccggtaatcaacgctaccagcggggtgagcggcgcgggtcgtaaggccgcgatcggcaacagcttctgtgaagttagcctgcagccgtacggcatatttaaccatcgccatcagccggagattgccagccaccttggggcaaaggtaatttttaccccgcacctgggtaattttaagcgcggcatcctggaaactatcacctgccgcctgaagccgggcgtcggccatgcgcagatcgcggcggtttaccagcaggcttacgccgataaaccactggtacgtttatatgataaaggcgtgcccgctttgaaaagcgtcgaaggcctgccattctgtgatatcggttttgccgtgcaggacgatcatctcatcgtcgtcgcggcagaggataacctgctgaaaggcgccgcagcgcaggcggtgcagtgcgcgaatattcgtttcggcttcgctgagacgcagtctcttatttaaggtgtgatgatgaacccattaattatcaaacttggcggcgtattactcgatagcgaagaagcgctggagcgcctgtttaccgcgctggttaactaccgtgaagcgcaccagcgtccgctgattatcgtccacggcggcggctgcgtggtggatgagctgatgaagcagctcaacctgccggtgcagaagaaaaatggcctgcgcgttacgccggctgagcaaatcgacatcatcaccggcgcgctggcggggaccgccaacaagacgctgctggcgtgggcgaaaaaacatggtatttcctcggtaggcctgttcctcggcgatggcgatagcgtgaaggtgacgcagctggatgctgagctgggccatgtcgggctggcgcagccgggctccccgacgctgatcaacaccctgttggccggcggttacctgccggtggtgagctctatcggggtgaccgatgaaggccagctgatgaacgtcaacgctgaccaggcggcgacagcgctggcggccaccctgggggcggatctgatcctgttgtctgacgttagcggtatcctcgacggtaaagggcagcgcattgccgagatgaccgccgagaaagcggagcagctgatcgagcaggggattatcaccgacggcatgattgttaaagtgaatgcggcccttgacgccgcacgtgctctgggtcgtccggtggatatcgcctcctggcgtcacgccgagcagctgccggcgttatttaacggcacgccgatcggcacacgtattctggcttaagatttcatgcccggcggcgcgtcgtctgccgggcttacaagaccgtaggccgggcggcacaatgccgccggcggaactaacgaataaaggaagcatgttatggcactttggggcgggcgttttacacaggcagcagatcaacggttcaaacagttcaacgactcgttgcgcttcgactatcgtctggcggagcaggatatcgttggctctgtcgcctggtcgaaagcgctggtaacggtcggcgttctgagtgccgctgaacagcagcagctggaagaagtgctgaacgtgctgctggaagaggtgcgcgccaatccgcagcaaatcctcgccagcgatgccgaagatattcacagctgggtggaaggcaagctgatcgataaagtgggccagctgggcaagaaactgcacaccgggcgcagccgtaacgaccaggtcgccaccgatcttaaactgtggtgcaaagataccgttgtcgaactgctctcggcgaaccgccagctgcagagcgcgctggtggagaccgcccagcagaatcaggacgcggtaatgccggggtacacccacctgcagcgcgcccagccggtgacgttcgcgcactggtgtctggcctacgttgaaatgctggcgcgtgacgaaagccgtctgcaggacgcgctgaagcgcctcgacgtcagcccgctgggctgcggcgcgctggcggggacggcgtatgaaatcgaccgcgagcagctggccggctggctgggctttgcctccgccacccgcaacagcctcgacagcgtgtccgatcgcgatcatgtgctggagctgctttccgatgcggctatcggtatggtgcatctgtcgcgctttgcggaagatctgattttctttaactccggcgaggcgaacttcgtcgagctttccgaccgcgtgacctccggctcctcgctgatgccgcagaagaaaaacccggacgccctggagcttatccgtggcaaatgcggccgcgtgcagggtgcgctgatcggcatgatgatgacgctgaaaggactgccgctggcctacaacaaagacatgcaggaagataaagaggggcttttcgacgccctggatacctggctcgactgcctgcatatggcggccctggtgctggacggcattcaggtaaaacgcccgcgctgtgcggaagcggcgcagcagggctatgccaacgccactgagctggcggattatctggtggcgaaaggcgtaccgttccgcgaggcgcaccatattgtcggtgaagcggtagtggaagccattgcgcaagggaaaccgctggaagcgctgaccctggccgatctgcagaaattcagcccggtgattgcggacgatgtgtatccgatcctgtcgctgcagtcctgcctcgagaaacgcgcagcgaaaggcggcgtctcgccgcagcaggtagcccaggctatcaacgaggcgaaggctcgtttaagctaatccttagatatctgccctccctgacccggccaagcccagcgacgccgggttttttatgcaaaaaaaaagcggacgcaaggtccgcaaaagttcacgttggctttagttgttcgggtagagaaacagtgtgacgggtcagtgattttcacaggtagaccgtctttatgggcgtattattgaacagaaaacttgatagggataatcgttcgttgctatgctatctatcgccatggactatcgtggcgatggaggatgaataatgaatattcgcgatcttgaatacctggtagcgctcgccgaacaccgccacttccggcgggcggctgactcatgccatgtgagccaaccgacgctcagcggacagatccgcaagctggaggatgagcttggcgtcatgctgctggagcgcaccagccgtaaggttctgtttacccaggcggggctgttgctggtggatcaggcgcgtaccgtgttacgcgaagtaaaagtgctcaaggaaatggcaagccaacaaggggaaaccatgtccgggccgctgcatatcggcctgatcccgacaattggcccgtacctgctgccgcacatcattccgatgctgcatcagaccttcccgaagctggaaatgtatctgcacgaagcgcagacccatcagctgctggctcagctcgacagcggtaagctcgactgcgccatcctggcgctggtcaaagagagcgaggcctttatcgaggtgccgctgttcgatgagccgatgatgctggctatctatgaagatcatccgtgggcgaaccgcgatcgggtgccgatgtcggatctggccggtgaaaagctgctgatgctggaggatggccactgtctgcgcgatcaggcgatgggcttctgctttgaagcgggggcggatgaggatacccacttccgcgcgaccagcctggaaacgctgcgcaatatggtggcggcaggcagcggcattaccctgctgccggcgctggcggtgccgcaggagagaaaacgcgatggcgtagtgtacctgccgtgcattaagccagagccaagacgcaccatcggtctggtttatcgtccgggctccccgctgcgcagccgctatgaacatctggcggaggccatccgcggtacgatggatggccatttcgacaaggcgttaaaacaggcggtttaagccgttcagcgcggcaacccggtacgcttccgccatggtcgggtagttaaaggtggtgttgacgaagtactcaatggtgttgccaccgcctttctgctccatgatcgcctggccgatatgaataatttcggccgcgcgctcgccaaagcagtgaatgccaaggatctccttggtttcacgatggaacaggatcttcagcgtaccaacgctcataccgacgatttgcgcccgcgccaggtgtttaaactgggcgcggcccacctcatacggcactttcatcgccgtcagctgctgctcggttttcccgacggagctgatttccggaatggtatagatcccggtcggaatatcttcaatcagatgcgctgaggcttcgcctttcaccagcgcctgggcggcaatgcgtccttgatcgtaagcggcagaagccaggcttggatagccgatgacatcgccaaccgcatagatgtgcgggagggcggtctgatacatgctgttgaccttcagctgaccgcggctgtcggtctgcagaccgatattttccagcgccagggtgtcggtgttgccggtgcggccgttagcgtacagcaggcaatcggccttcagctttttgccggacttcaggtgcatgatcaccccgtcatccaccccttcaattttctcatactcctcgttgtggcgaataaccacgccgctgttccagaagtgataagagagcgagtctgacatctcctgatcgaggaaggccagcagacgatcgcgggtgttgatcagatcgaccttcacctccatgccgcggaagatcgacgcatattcacaaccgatcaccccggcgccgtaaatgatcacatggcgcggctcatgctgcaggctgagaatcgaatcgctgtcatagatgcgcgggtggtggaaatcgacatccgccggatggtagggacgcgatccgcaggcgataacgaatttctccgcggtcacagtctcgaccgtgccgtcatggcactccagcgccagagtatgctcatccacgaagtgggcattgccctgcagaatttcacagtggttgcgctcatagaatccctggcgcatatgagtctgctggttgatgacgctgtcggcatggttaaggatgtcggcgaaagaagagcgaagaaggcgggagtggtcgctgtagagggggttttggttaaactcgataatacggctgacggcatggcggagggctttcgacgggatggtgccccagtgggtgcaaccgccgccgacattatggtagcgctcgatgacggcaacgcgtgctccctgtttcaccagtcccatggcggcgccttccccgccaggaccggaaccaatcactattgcatcataatcccaagagtgtgacatggcattactcacctgttttatacataaaataaacacgatgataacattcgctgcgctttaacccaattatcgttgtgcttttttgcagcataaaagcagaaacggctcgtaaacaatcattcacaatccagggcaaaccgattagttttaatctctggtatagtgccagcagggctattggaaggattcatacatcgtgatgggcgtaagagcacaacaaaaagaaaaaacccgccgttcgctggtggaagcggcattcagtcaacttagcgctgagcggagtttcgccagcctgagcttgcgtgaagtggcccgggaagcagggatcgcgccgacgtccttttatcgtcattttcgcgacgtcgatgagctgggcctgacgatggtcgatgagagcggactgatgctgcgccagctgatgcgccaggcgcgccagcggatagccaaaggcggcagcgtgatccgcacctcggtctccacctttatggaatttatcggtaacaacccgaacgccttccgcctgctgctgcgcgagcgctcgggaacttctgcggcgtttcgcgccgccgtcgcacgcgagatccagcactttattgcggaactcgccgactatttagaactcgaaaaccatatgccgcgcgcctttaccgaagcgcaggctgaagctatggtcaccatcgtttttagcgctggcgcggaagcgctggatgtcggccctgagcagcgccggcagctggaggaacggttggtactgcagcttcgaatgatctcgaaaggcgcgtattactggtatcgccgtgaacaagaaaaaatgtcacatcattccgaataacgtgaaggacgagcaatgaaacactcagttcaagataaaggtacgctgctgctggcgctgattgccgggttatccattaatggcgcctttgcggcgctgttcagttcgatagttccgttttccgtcttccccattttatccctgctgctgacggtctactgtctgcatcagcgctatcagaatcgcagtatgcccgttgggctaccgggcctggccgccgccttttttattctcggggtgctgttgtacagcaccgtcgtgcgtgcggagtacccggatatcggttctaacttcttcccggccgttctgtccgtcgcgatggtcttctggatcggctacaagatgcgtaaccgcaaagataccgcagccgagtaagccgcaagcggtaaaaaaaccggcaatatgacgttgccggtttttttgggcctatttgcgggtcagcaggacgccgcactccatgtgatgggtatacgggaactggtcgaacagcgccagccgggtaacgttgtgcgtctggcttagcgtttccagattgcgacacagcgtttccgggttgcacgaaatgtacaaaatacgcggataggcctgcaccattttttccgtctcgctgtccagcccgctgcgcggtggatcgacgaagatggtttcgcactgatagctatgcagatcgataccctgcagccggttgaactgccgcaccccgttcatcgcctgagtaaactcttccgccgccatgcggataatctgcacgttgtcgatatggttagcggcgatgttgtactgcgccgccgccaccgacggtttggcgatttcggtggccaatacgcgatcgaaattacgtgccagcgccagcgagaagttaccgttgccgcagtacaattccagcaggtcgccagtcgcccctttggtgacatccagtgcccactccagcatctgaatgttcatggccgcgttcggttgggtaaagctgttttccacctgacggtagatcatctcccgcccgccaaccggcaggcgttcatctatataatcctgatcgagctcgattttagttttggtcgcccgcccaatcagatgcacattgagcccctgggctcgcagggcgtcacgcagcgcctccgcttgctctcgccaggcatcgtccagctttttatgatacagcagcgaaacgaccgcctggttgctgagggtggtcagatagtcaatctggaacagcttctggcgtagcacgggattgttgcgtacgccctccagcatggcggtcatcagctgattgatcagcgcgctggcggccgggaagctgtcaacgcgaatccgcgaccgggtctgctgatcgaaaataatatggtacagatcgtcgccatcgtgccacagacggaactcggcgcgcatacggtagtggctgaccggcgaacgaaacacttccggaaccggcgcggcaaaaggcgccatcatggtttgcaaacggacgactttttctgccagctgcgcttcgtattgttcggtaggaaggtgttcgggggtcatgatgtatcctgaataaaataagtacgcggggattgtagggaaagcgccggggatgtccagcctcgaatgccgcgggaaatataattagcagtctggacatctatatggttctgattgtagcattcgcctaccggtcctgtgagttaaaagggaacccagtggaaatctggggctgacgcgcagcggtaaggaaggtgagaaatgagcgcactcggtgcagacactgcggctagccgtgggaagtcattatttcttgaaacagcctccaagcccgaagacctgccggaatacgtcgcactgggttttatcgtcgcgagcaactgataaaacctgcggcatcctttttctgtttcggatgcttttacaatgattaaaaaagcttcgctgatgacggccttatccgtcacggcattttccggctgggcgcaggatagcaattcagatacgttggtggtgacagcaaaccgttttcaacagccggtcaataccgtgctggcgccgaccgacattgtgacgcgcgatgacatcgaccgctggcagtccaaagatttaaacgatgtcatgcgtcgtcttcccggggtcgatattgcccgcaacggcggcatggggcagagcgcttcgctgtatgttcgggggacggaggctcgtcacgtgctggtgctggtcgacggtgtgccgatggcgcgtccggggatctccaacggcgtagatatcagtcagatccctatctcactggtccagcgggtggaatacatccgcggcccgcgctccgcggtgtacggctccggagcgatcggcggggtggtgaacatcatcaccatgaccgacgctgagcgttcgcagatcaacgccggcgcgggtacgaacggctatcagtcctatgacggcgcctttaacaagcggtttggcgatacgttggttaccgctgctggcgcctatcagaccaccaaagggtttaacgtccagccgaattcctcttacagcggcgacagcgatcgcgacggctaccgcaataaaatgctgtggggcggggtacagcatcagttcgatgacaacttctcggggttcttccgcggctatggttattccgccaacgctgactatgaccagggtaactggggctacgcaggtggaaacgatgaagatcaatcctatacccaatcctgggataccggtctgcactaccactccggaatttactcctcccagctgattgctaactatcagcgcatcaaagattacaactacagcagcgacgctggccgctatgccgcgggcaccaccctggatgatatggaacagcgctatatccagtggggaaataatgttgtggtaggccatggggcagtgagcggcggcgttgactggaaacaagagaagctgaaatccagcggaacgaccagtaccgacgtgtataagcgtgacaccaccggtctttatctgacgggacagcagcagattgacagcgtgacgctggaagcttccggccgtgaggatcatgacgagcagtttggctggcacggtacctggcagacggccgcaggctgggaatttatcgacggttatcggacaacgctctcgtacggcacaggattcctcgccccctccctcgggcagcagtacggtgcagaacgctttggcatcgcctctaacccgaatctgaagccagaggagtcgaagcaatgggaagcgggccttgaagggttaacggggccggtcgactggcgcctctccgcatatcgctatgagattcaaaacctcatcgattacgacaacaacgcctattacaacgtcaagtcggcgacgattaaggggctggagtggacggggaatataaccaccgggccggtggagcaccatctgacgctgcagtatgttgaccctcgcgatgatgaaaccaataagatcctctatcgccgggcgaagcagcaggtgaaatacgagctgaacggccaggtctacgatctggggtgggatgtgacgtatcactacatcggcaagcgttacgattatgactacgacaactcgcgtaccgtcaatatgggtgggttgagcctctgggatgtcggtttatcgtatcccgtcacctcacacctgacagttcgtggtaaaatagccaacctgttcgataaagattacgagacagtttatggctaccaatctgcaggacgggaatacaccttgtctggcagctacaccttctgatccacgtcccaccgtgctggtgtttgattccggcgtcggtgggttgtcggtttataatgagattcggcagctgctgccgaatctgcattacatctatgctttcgataacgttgccttcccctatggcgagaagagcgaggagtttatcgttgagcgcgttgtggaaatcgtcaccgctgtccagcagcgttatcccctggcgctggcggtgatcgcctgcaataccgccagtaccgtctccctgcctgccctgcgtgaaaagttcgctttccccgtcgttggcgtggtgccggcgatcaagcccgccgcccgtttaacggcgaacggcattgttggcctgctggcgacgcgcggtaccgtaaagcgtccttatacccgtgagctgatcgaccgctttgccaatgaatgtcggattgaaatgctggggtcggcggagctggtggagctggcggaagcgaagctgcacggcgagcctgtgccgttagaagagctgcgccgtatcctgcgcccatggctgcggatgcaggagccgccggatacggtggtgctgggctgcacccactttcctcttttacaggaggagctgcagcgcgttctgccggaaggcacacggctgatcgattccggcgcggcgattgcccgacgcaccgcctggctgttagagcatgaagcgccggatgcgaagtccagcgacgagaataaagcattctgcatggcgctgacggcagaaacagaacagcttttacccgttctgcgtcgctatggcttctcgacgctggaaaaattaccgctctaagggcgttttgcacaaaaaagagacggttgaataattttttgaaaacagggcttgtcaacgtctcagaactccctataatgcgcctccactgacacggaacaacggcaagcaagccgccgggtcagcagggttttagcggtgaagttcagcgctaaaaactgacagagaaaagcaaaataagggcttgactctgaatgaggaaaacgtattatacgggacctcgcaacggtgagctgaaagccgcgttgcaactgctctttaacaatttatcagacaatctgtgtgggcactcaaagtgacatggattcttaacgtcctcggacgaaaaatgaataccaagtctcaagagtgaacacgtaattcattacgaagtttaattctttgagcatcaaacttaaattgaagagtttgatcatggctcagattgaacgctggcggcaggcctaacacatgcaagtcgagcggtagcacagagagcttgctctcgggtgacgagcggcggacgggtgagtaatgtctgggaaactgcctgatggagggggataactactggaaacggtagctaataccgcataatgtcgcaagaccaaagtgggggaccttcgggcctcatgccatcagatgtgcccagatgggattagctagtaggtggggtaatggctcacctaggcgacgatccctagctggtctgagaggatgaccagccacactggaactgagacacggtccagactcctacgggaggcagcagtggggaatattgcacaatgggcgcaagcctgatgcagccatgccgcgtgtgtgaagaaggccttcgggttgtaaagcactttcagcggggaggaaggcggtgaggttaataacctcaccgattgacgttacccgcagaagaagcaccggctaactccgtgccagcagccgcggtaatacggagggtgcaagcgttaatcggaattactgggcgtaaagcgcacgcaggcggtctgtcaagtcggatgtgaaatccccgggctcaacctgggaactgcattcgaaactggcaggctagagtcttgtagaggggggtagaattccaggtgtagcggtgaaatgcgtagagatctggaggaataccggtggcgaaggcggccccctggacaaagactgacgctcaggtgcgaaagcgtggggagcaaacaggattagataccctggtagtccacgccgtaaacgatgtcgatttggaggttgtgcccttgaggcgtggcttccggagctaacgcgttaaatcgaccgcctggggagtacggccgcaaggttaaaactcaaatgaattgacgggggcccgcacaagcggtggagcatgtggtttaattcgatgcaacgcgaagaaccttacctggtcttgacatccacagaactttccagagatggattggtgccttcgggaactgtgagacaggtgctgcatggctgtcgtcagctcgtgttgtgaaatgttgggttaagtcccgcaacgagcgcaacccttatcctttgttgccagcggttaggccgggaactcaaaggagactgccagtgataaactggaggaaggtggggatgacgtcaagtcatcatggcccttacgaccagggctacacacgtgctacaatggcatatacaaagagaagcgacctcgcgagagcaagcggacctcataaagtatgtcgtagtccggattggagtctgcaactcgactccatgaagtcggaatcgctagtaatcgtagatcagaatgctacggtgaatacgttcccgggccttgtacacaccgcccgtcacaccatgggagtgggttgcaaaagaagtaggtagcttaaccttcgggagggcgcttaccactttgtgattcatgactggggtgaagtcgtaacaaggtaaccgtaggggaacctgcggttggatcacctccttaccttaaagaacctgcctttgcagtgctcacacagattgtctgatgaaaacagcagtaaaaacctctacaggcttgtagctcaggtggttagagcgcacccctgataagggtgaggtcggtggttcaagtccactcaggcctaccaaatttgcgaagcaaatttgaagaggttgcaaacgatggggctatagctcagctgggagagcgcctgctttgcacgcaggaggtctgcggttcgatcccgcatagctccaccatctttactgcgaacacaagaaaacttcagagtgaacctgaaaaggtgcactgcgaagttttgctctttaaaaatctggatcaagctgaaaattgaaacgacacacagttaatgtgtgttcgagtctctcaaattttcgcaatcagaagtgaaacatcttcgggttgtgaggttaagcgactaagcgtacacggtggatgccctggcagtcagaggcgatgaaggacgtgctaatctgcgaaaagcgtcggtaaggtgatatgaaccgttataaccggcgatgtccgaatggggaaacccagtgtgattcgtcacactatcgttaactgaatacataggttaacgaggcgaaccgggggaactgaaacatctaagtaccccgaggaaaagaaatcaaccgagattcccccagtagcggcgagcgaacggggagcagcccagagtctgaatcagcttgtgtgttagtggaacggtctggaaagtccgacggtacagggtgatagtcccgtacaccaaaatgcacaggctgtgaactcgaagagtagggcgggacacgtggtatcctgtctgaatatgggggaccatcctccaaggctaaatactcctgactgaccgatagtgaaccagtaccgtgagggaaaggcgaaaagaaccccggcgaggggagtgaaaaagaacctgaaaccgtgtacgtacaagcagtgggagcaccttcgggtgtgactgcgtaccttttgtataatgggtcagcgacttatattctgtagcaaggttaaccgtataggggagccgcagggaaaccgagtcttaactgggcgttaagttgcagggtatagacccgaaacccggtgatctagccatgggcaggttgaaggttgggtaacactaactggaggaccgaaccgactaatgttgaaaaattagcggatgacttgtggctgggggtgaaaggccaatcaaaccgggagatagctggttctccccgaaagctatttaggtagcgcctcgtgaactcatcttcgggggtagagcactgtttcggctagggggtcatcccgacttaccaacccgatgcaaactacgaataccgaagaatgttatcacgggagacacacggcgggtgctaacgtccgtcgtgaagagggaaacaacccagaccgccagctaaggtcccaaagtcatggttaagtgggaaacgatgtgggaaggcacagacagccaggatgttggcttagaagcagccatcatttaaagaaagcgtaatagctcactggtcgagtcggcctgcgcggaagatgtaacggggctaaaccatgcaccgaagctgcggcagcgacactatgtgttgttgggtaggggagcgttctgtaagcctgcgaaggtgtgctgtgaggcatgctggaggtatcagaagtgcgaatgctgacataagtaacgataaagcgggtgaaaagcccgctcgccggaagaccaagggttcctgtccaacgttaatcggggcagggtgagtcgacccctaaggcgaggccgaaaggcgtagtcgatgggaaacaggttaatattcctgtacttggtgttactgcgaaggggggacggagaaggctatgttagccgggcgacggttgtcccggtttaagcatgtaggctggttgtccaggcaaatccggataatcaaggctgaggtgtgatgacgaggcactacggtgctgaagtaacaaatgccctgcttccaggaaaagcctctaagcatcaggtaacatcaaatcgtaccccaaaccgacacaggtggtcaggtagagaataccaaggcgcttgagagaactcgggtgaaggaactaggcaaaatggtgccgtaacttcgggagaaggcacgctggtgtgtaggtgaagtccctgcggatggagctgagaccagtcgaagataccagctggctgcaactgtttattaaaaacacagcactgtgcaaacacgaaagtggacgtatacggtgtgacgcctgcccggtgccggaaggttaattgatggggttatccgtaaggagaagctcttgatcgaagccccggtaaacggcggccgtaactataacggtcctaaggtagcgaaattccttgtcgggtaagttccgacctgcacgaatggcgtaatgatggccaggctgtctccacccgagactcagtgaaattgaactcgctgtgaagatgcagtgtacccgcggcaagacggaaagaccccgtgaacctttactatagcttgacactgaacattgagccttgatgtgtaggataggtgggaggctttgaagcgtggacgccagtctgcgtggagccaaccttgaaataccaccctttaatgtttgatgttctaacgttggccccttaccggggttgcggacagtgtctggtgggtagtttgactggggcggtctcctcccaaagcgtaacggaggagcacgaaggttagctaatcctggtcggacatcaggaggttagtgcaatggcataagctagcttgactgcgagcgtgacggcgcgagcaggtgcgaaagcaggtcatagtgatccggtggttctgaatggaagggccatcgctcaacggataaaaggtactccggggataacaggctgataccgcccaagagttcatatcgacggcggtgtttggcacctcgatgtcggctcatcacatcctggggctgaagtaggtcccaagggtatggctgttcgccatttaaagtggtacgcgagctgggtttagaacgtcgtgagacagttcggtccctatctgccgtgggcgctggagaattgaggggggctgctcctagtacgagaggaccggagtggacgcatcactggtgttcgggttgtcatgccaatggcactgcccggtagctaaatgcggaagagataagtgctgaaagcatctaagcacgaaacttgccccgagatgagttctccctgagactttaagtctcctgaaggaacgttaaagacgatgacgttgataggccgggtgtgtaagcgcagcgatgcgttgagctaaccggtactaatgaaccgtgaggcttaaccttacaacgccgaagatgttttggcggattgagagaattttcagcttagattcagagttgagtacgcaatataaagaattgcgtactgagcacaaagaatttgcctggcggcactagcgcggtggtcccacctgaccccatgccgaactcagaagtgaaacgccgtagcgccgatggtagtgtggggtctccccatgtgagagtagggaactgccaggcatcaaattgcagtaagccggggtgacaaccggtggtaataaagcgaagaaattcggtggagcggtagttcagtcggttagaatacctgcctgtcacgcagggggtcgcgggttcgagtcccgtccgttccgccacttatttaacattaagcctgctcaaatagcaggcttagtggtaagaaaattttaggggcgtagttcaattggtagagcaccggtctccaaaaccgggtgttgggagttcgagtctctccgcccctgccatttataagaatcctttgctcaggcaaaggatttttttttatctctaatctccattggcaatatcccctacgaaaataccttgctgatctccgtccatggagagtagcgtttattccagaatagggtttttcaggatctcatggatctgcgcctgcttatcgctattttgtaaccagatcgcataaagtggacgggataacgtagcgctgtccatgaccgtatgtaacccatgcttctctttcgcccagcgaacaggtagccaacagcagccgttcaggcgcgataattgctgatagatcagttcagctgaagaggtagtgagcagcggaacatcatcgcttcctatcagtcccacttcgttttgctgaaaatcaggcccccattcaaggcgcaagtaattcaattcatttctgttttttgcaggcgatgcgcaatacagggcaagagtaaaattacccaacagctggctgcttaattcatccatcttcggcgattcggtggtgatcagcagatccaactggcgttcgtgaagctgtttaaccaacgactgccgctgcgcgatacgggcttcaaactggagattgtaaggtgcgctgtagagggtaccgagccagctgttaagcatacattcccacagggaggcgctggccccaatggagaattcattatgtcgcgaagagtgtgccacctccttgcgcgcagcctgccaggtattcatgagcgtttcggcataggggaggagcttttcgccggcggtcgtcaggcggatgttattacgatgacgggtgaacagattcacaccaagttgattttccagctgacgaatacgaaagctgactgctgactgtgtcaggtaaagcgcctctgctgctcgcccaaagtgacgagttctactcacttccaggaaagtcttgagcaattccgtatccacaccgttctccacaaaattatttgtcgtgatgatttaaatgttttgtttgacgctctgtcaagcgtaactaatactccgcgccataaatagctcggccaaagaatcaggagcgtgtaggatggcggaaagctttacgacgactaatcgttttttcgacaataaaaattatccacgcgggttctcccgtcacggtgatttcaccatcaaagaggcgcaactgctggaacgtcatggttatgcctttaacgaactggaactgggtaagcgcgaacctgttaccgaagatgaaaaacaatttgtctcggtgtgccgtggtgaacgtgagccggtgacggaagcagaacgcgtatggattaagtatatggcgcgtatcaagcggccgaagcgtttccatactctgtccggcggcaaaccgcagatggaaggcgctgacgattacaccgaaagcgatgactaagaaaaaagggcgtaagcccttttttttacgccatcattttctgcagatggttgagcatccgatcaattgcccgatagctgagcgcctcctgcaaatgacagcgttcaatctcttcaacctctgccagatcggcaatggttctcgcaacctttaacagacgctgccaggcgcgaatagaaagccccagctgcgttagcgtctgttccagccagacagcatcctcccgccttaagcgacagcagttcttcatttcacgattctcaagatgggcattgagtttattttgcctgagcatttgtcgttcacgcgccgccagcacccgctgccggaccgttgcgctcgattcttcgccctgcgagccctgactcagtattcctggcggtggcaatgggatctctaaggaaagatcgaagcggtcgaggaaggggcctgataggcgtccaaggtagcgcaatgtctgctccggcgatgcacgattatgtttaccctgataatgtcctgtcgggcttggattcatcgctgcaataagctgaaagcgcgccggatagtcaattttggcgcgcgagcgtgatatgtggatcttgcctgactcaatgggttcgcgtagcgcatccagtacccgccgctcaaactccggcagttcatcaagaaacagcacgccattatgggccagggaaatctcaccggggaccggtatcgagccgccgcccaccatcgctgccagcgaggcgctatggtggggggcgcggaacggcctctgacgccaccgcgtctttgcggtgtggaggttgaccagactctgtatggccgcgctctccagcgcttcctgattgcttaatggcggcaggagaccggggagtcggctggctagcatggttttcccggtcccgggcgggcctatcaggagcaggttgtgaccaccggcggccacaatctccagcgctcgtttgccctgctgctggccgataacatcgagcagatcttcgtaacgttcatcccgagcaggcgcctcggcgagaggcggcgaaagcgatgtctgccccgcaagaaatgcgcaaacctcctgcagatggtcggcgaccagacaatcgctgccgccgatcaggccgacctccgccgcattgtcagaggagacgacaatgcgccggccggctttgatggcctccattgcgctggggatcgcccctggaacgcctcgtaacccacctgtaagggcgagttcgcccacaaactcatattgattcagtcgcgtcgtgttgagctgctctgaggcaacgagaagcgcgagagcgatgggcaaatcgtatcgtccgccttctttgggcagatccgctggcgccaggttaatggttatcttcttcgcaggaaaagcgtagccgctgttgatcagggcgctgcggacccggtcgcgggcctctttcacggtggtttccggcagcccgaccatagttagaccaggaagaccgttgctgagatgaacctcaacggtaatcaatggcgcttcgataccgagcgccgcgcgagtatagacgatagcgagcgacataaaacctcctggacagagaagaattatggttggcatgacgtaaagcgagaatggaaaaagtgcgaatttagaactgcgtatccatacttttcgcggcatatcgttacatttagccgaaaatggacgtttgatcgcaaaacagagctatgttggcaaagagggcgccgaagagcgcggcaggggtgagaaaactgaatttttttcatttttgatttttttcatataaaacaattatttttattgaaaccgttaggctgattagcaacgaagatataaaaaaatcttgtgctttatgtgatgtctgtggtaactctttaggtattccttcgaacaagaagccagaaagtatagaaaatgacagcccttctacgagtgattagcctggtcgtgattagcgtggtggtgattattatcccaccgtgcggggctgcacttggacgaggaaaggcttagaaatcaagccttaacgaactaagacccccgcaccgaaaggtccgggggtttttttataactgaaataacctaagcgaggagcagatgatgacttttagcataaaattctgtttctcccgatttatgacggggaactaactatgaatggcgcgcagtgggtggtacatgctttgcggacacagggagtcgacacagtttttggctatccgggtggcgcaattatgccggtttacgatgcactgtatgacggcggcgtggagcacctgctgtgccggcatgagcaaggggcagccatggcggccattggttatgcgcgagcaaccggtaaaaccggggtgtgtatcgcgacgtccggcccgggcgcgaccaatctgatcaccggcctggcggacgccctgcttgactctattcccatcgtagctatcaccggccaggtggccgcacccttcatcggcacggatgcgttccaggaagtagacgttctcggtttgtcactggcctgtactaagcacagtttccttgtgcagtctctggacgaactgccgcgggttattgctgaggctttccaggtggcaaactcaggccgtccaggtccggtgctggttgatatccctaaggatattcagatggcgcagggcgacctcgatccccatttctctaccgtcgccgatgagatggcatttccgcaggcggaagtggcgcaggctctgcagatgctggcccaatcgcagcaaccgatgctgtatgttggcggcggggtcggcatggcgcaggcggtaccggctttgcgcgaattcctggcggtgaccaggatgccggcaacctgcaccctgaaagggctgggcgtggtggatgctgattatccctattatctcggcatgctgggaatgcacggcactaaggcggccaacctggcagtacaggagtgcgatctgctgatcgccgtcggcgcgcgctttgacgatcgcgtgaccggtaagctcaataccttcgcaccgcatgccaaagtgatccacatggacatcgatccggcggagctgaacaagctgcgtcaggcgcatatcggtctgacaggcgatctgaactgcctgctgccggcgctgcagcagccgttagctatcgatggctggcgcgagcggagtgccgcactgcgtgccgagcatgcctggcgttacgatcatcccggtgaggcaatctacgcgccgctgctgctgaagcagctttccgaccgcaagccggcggacagcgtggtgaccaccgacgttggccagcaccagatgtggtcggctcagcatatgacctatacccgcccggaaaactttatcacctccagcggcttaggcaccatgggctttggcctgccggccgccgttggcgcccaggtggcgcgccctaacgatacggtgatctgtatctccggtgacggctccttcatgatgaatgtacaggagctgggcaccgttaaacgcaagcagttaccgctgaagatcgtgttactcgacaaccagcggttagggatggttcgacaatggcagcagctgtttttccaggaacgttatagcgaaaccactctgactgataaccctgatttcctcacgctggccagcgccttcggtattcctggccaacacatcacccgtaaagaccaggttgaagcggcactcgacaccatgctttcgagccaggggccatacctgcttcatgtctcaatcgacgaacttgagaatgtctggccgttggtgccgcccggcgccagtaactctgaaatgctggagaaattatcatgatgcaacatcaggtcgctttacaggcacgtttcaatccggaaaccttagagcgcgtgctgcgcgttgtccgccaccggggtttccacatctgcgcaatgaacatggaaaccgcgccggacgcacagaacataaatatcgaattgaccgttgccagcccgcggcccgtcgaattactgtttagtcaattaagcaaactggtcgacgttgcctgcgtcgagatccagcaacccacatcacaacaaatccgcgcctgagcgcaaaggaagaaaaatgacgacgaaaaaagctgattacatttggttcaatggcgagatggttccgtggggcgaagcgaaagttcatgtgatgtcccatgcgctgcactacggtacctcggtattcgaggggatccgttgctacgactcgcacaaaggcccggtggtgttccgtcatcgcgaacatatgcagcgtctgcatgattcagccaaaatttatcgtttcccggtctcccagagcgtcgacgaactgatggaagcctgccgcgaagtcattcgaaccaataatctgaccagcgcttatatccgtccgctggtgtttgttggcgatgtcggcatgggggtaaacccgcctccgggttacaacactgacgtgatcatcgcggcgttcccatggggagcctacctcggcgcagaagcgcttgagcaggggatcgatgcaatggtctcttcctggaaccgcgcggcgccgaacaccatcccaaccgcggcgaaagcgggcggcaactacctctcctctctgctggtcggcagcgaagcgcgtcgtcacggttatcaggaaggtatcgccctcgatgttaacggctatatctccgaaggcgcaggggaaaacctgtttgaagtgaaggacggtgtactgttcaccccgccgtttacctcttccgcgctgccgggcattacccgcgacgcgatcatcaaactggcgaaagatcttggtatcgaagtccgcgagcaggtgttgtcccgtgaatccctgtatctggcggatgaagtcttcatgtccggcactgcggcggaaatcaccccggtgcgcagcgtggacggcatccaggtcggcgcaggccgtcgcggtccggtaaccaaacgcattcaggaagccttctttggcctcttcaccggtgaaacagaagataaatggggctggttggatccggtaagtaagtaattaaaaatgggacggcacgcaccgtcccatttaataaacacagatgggagtaaaaagagcatgcctaagtaccgttccgccaccaccacacatggccgcaatatggcgggcgcccgcgcgttgtggcgcgcaaccggaatgaccgatgccgatttcggcaaaccgattatcgccgtcgttaactcctttacccagtttgtccccgggcacgtgcacctgcgcgatctcggcaaactggttgccgagcagattgaagccgccggtggcgtggccaaagaattcaacaccatcgcagtggatgatgggatcgctatgggccacgggggtatgctctattcactgccatcccgcgagctgatcgccgactcggtggagtatatggttaacgcccactgcgctgatgccatggtttgtatctccaactgcgacaaaatcaccccggggatgctgatggcttccctgcgcctgaacattccggtgatctttgtgtccggcggcccgatggaagccgggaagaccaagctgtcagataaaatcatcaagcttgacctggtggatgcgatgattcagggggcggatccgaaagtgtccgacgagcagagtaatcaggtggaacgctccgcctgcccgacctgcggctcctgttccgggatgttcacggcgaactccatgaactgcctgaccgaagcgctgggcctgtcgcagccgggcaacggctctctgctggcgacccacgccgatcgtaaggagctgttcctaaacgccgggaaacgtatcgtggagctgaccaaacgctattacgagcaggatgacgcttccgcgctgccgcgcaatatcgccagcaaggcggcctttgagaacgctatgacgctggatatcgccatgggcggctccaccaataccgttctgcacctgctggcggcggcgcaggaagctgaaatcgacttcaccatgagcgatatcgataagctctcccgcaaagtgccgcagctgtgtaaggtggcgccgagcacgcagaaataccatatggaagatgtgcatcgcgccggcggcgtgctgggcattctgggcgagctggaccgcgccgggctgctgaatcgcgaggtcaaaaacgtccttggcctgacgctgccgcagaccctggaacagtacgatgtgatggtgacccaggacgacgcggtgaaaaaaatgttccgcgccggcccggcgggcatccgtaccacccaggcgttctcgcaagactgccgctgggataccctggatgacgatcgcgccgaaggctgtatccgttctctggaacacgcttacagcaaggacggcggcctggcggtgctgtacggcaatttcgcagaaaacggttgtatcgtgaaaaccgccggcgtggacgacagcatcctgaaatttaccggtccggcgaaagtatatgagagccaggacgatgcggttgaggccatcctcggcggtaaagtcgtggaaggcgacgtcgtggtgatccgctacgaagggccgaaaggcgggccggggatgcaggagatgctttaccccaccagcttcctgaagtcgatggggctgggcaaagcgtgcgcgctgatcaccgatggccgtttctccggcggcacctcagggctctctatcggtcacgtctctccggaagcggcgagcggcggcaacattgcgctcattgaagatggcgacatgatcgcgattgatattccgaaccgcagcatccagctgcagctgagcgatgcggaaattgcggcgcgtcgtgaagcccaggaagcgcgtggcgaccaggcgtggacgccgaagaatcgccagcgtcaggtctcctttgcccttcgcgcctacgccagcctggcgaccagcgccgacaaaggcgcggtacgcgataaatccaagctgggtggctaatcatggcggattcacaacccttgtccggcgcccctgagggcgccgagtacctgcgagcagtgctgcgcgcgccggtttatgaagcggtgcagaaaacgccgctgcaaaaaatggataagctctcgtcgcggctggataacgttattctggtgaagcgtgaagatcgccagccggtacacagctttaagctgcgcggcgcttacgcgatgatgtccagcctgactgccgaacagaaatcccacggggtgatcaccgcttcggcgggcaaccatgcccagggcgtggcgttttccgcatcgcggctgggcgttaaggcgctgatcgtgatgccggtagcgaccgccgatatcaaagtcgatgccgttcgcggctttggcggcgaagtgctgctgcacggcgccaactttgacgaagcgaaggcgagagcgattgagctggcgcaacagcagggttttacctgggtgccgccgttcgatcacccaatggtcatcgccggacagggaaccctggcgctggagctgctgcagcaggatgcccatattgaccgcgtattcgtcccggtgggcggcggcggtctggcagcgggcgtggcggtgctgatcaagcagctgatgccgcagatcaaagtgatcgcggtggaggcggaagattctgcttgcctgaaggcggcgctggacgcaggccatccggtggatctgccgcgcgtcggcttgtttgccgaaggcgtggcggtcaaacgcatcggcgatgaaacgttccgtttatgccaggagtatctggacgatatcatcaccgtcgatagcgatgctatctgcgcggcgatgaaggatctgttcgaagatgtgcgggcggtggcggagccttccggcgcgctggcgctggcggggatgaaaaagtatatcgcccagcataacatccgcggcgagcgtctggctcatattctgtccggggccaacgtcaacttccacggcctgcgctacgtgtccgagcgctgcgagctcggggaacagcgcgaagcgctgctggcggtgacgatcccggaagagaaaggtagctttttgaagttttgccagctactggggggacgctcggtgacggagttcaactaccgctttgccgatgccaaagacgcctgtatttttgtcggggtacgcctgagtcgtggcctggaagagcggaaagagatcctccagttactgaacgacggcggctacagcgtggtggatctctctgatgatgagatggctaagctgcatgtgcgctatatggtcggcggccggccgtcaaaagcgctgcaggagcggctgttcagcttcgagtttccggaatcgccgggggcgctgctgaaattcctgcatacccttggcacccactggaatatttcactgttccactaccgcagccacggcactgactatggtcgggtactggcggccttcgagttgggcgagcacgagccggactttgaaactcgtctcaatgagctgggctatgagtgccacgacgaaacgcataacccggcattccgctttttcctcgcgggttagtggttgggaagaattttccagaaagcatcaataagcggctcatgcagccgctttttttgtgcgcaaacacccagctcaaacggcgtttgctcatcgctgcgctccaggatcatcaccctgttgcgtaccggctccggactgttctccagcaccacttccggcagcagcgccacgccgcatcccagggcgaccatcgacaccatcgcttcgtgcccgccgacggtggcgtagatcgacggattgctgattttatgccgccgaaaccacagctcgatgcgccgacgtaccggcccctggtcggccatgataaagggcactgtcgaccagtcggggcgctcgacggtcacctggttgcgcaccgggcagggaagggccggggcaattaacaccacggcgaggttctccagcatcgaaaacgccaccgaccctggcagagtctccggcttaccggcaatcgccaggtcggcttcgccggtgacgaccttctccatagcgtcggcggcgtcgccggtcgagagcttgatctccaccgaggggtgcgcggcgcgaaagcggtcgaggatcggcggcagatggctataggcggcggtgacagagcagaagatatgcagctcgccggagagcgaagggccctgctgatcgatgacgtgacgaagctgctggtactgcaataaagtttgctgggcaaaggtacgtaactcttccccggcttcggtaagggtcaccgtgcgattatctcgcacgaacagcggctggccgaggtcctcttccaggcgttggatctggcgcgaaagcgtcgacgggctgacgtgcatggcccgcgcgctgcggccaaaatggcggctttccgccagatgcagaaaagttttcagatcgcgtaaatccacggcgcgtactccccggttttgtatttcataaaatgcaacgtgacgttgtgaatatatcaatttccgcaataaaattcctgtcatatagtaagttcattctcgcaaaagcgaaccgaacaataagcacgacacaacatcacggagttacagacatggctaactactttaatacactgaacctgcgccagcagctggcacagctgggcaaatgccgctttatggcgcgcgacgaattcgccgatggcgcaagctaccttcagggtaaaaaagtggtcatcgtcggctgcggcgcgcagggcctgaaccagggtctgaacatgcgtgactccggtctggatatctcctatgcgctgcgtaaagaagcgatcgctgagaagcgcgcctcctggcgtaaagcgactgaaaacggcttcaaagtcggcacttatgaagagctgatcccgcaggccgacctggtggttaacctgacgccggacaaacagcactcagacgttgtgcgctccgtacagccgctgatgaaagacggcgcagcgctgggttactcccacggcttcaacatcgtggaagtgggcgagcagatccgtaaagacatcaccgtggtgatggtggcgccgaagtgcccgggcaccgaagtgcgtgaagagtacaaacgcggtttcggcgtaccgacgcttatcgcggtacacccggaaaacgacccgaaaggcgaaggcatggcgattgccaaagcatgggcggcggcgacaggcggccaccgcgcgggcgtgctggaatcttccttcgtggcggaagtgaaatctgacctgatgggcgagcaaactatcctttgcggcatgctgcaggcgggttctctgctgtgcttcgacaagctggtggcggaaggtaccgatccggcgtatgcagaaaaactgattcagttcggctgggaaaccatcaccgaagcgctgaagcagggcggcatcaccctgatgatggatcgcctctccaacccggcgaaactgcgcgcttatgcgctgtccgagcagctgaaagagatcatggcgccgctgttccagaaacacatggacgacatcatctccggcgaattctcctccggcatgatggcggactgggcgaatgatgataagaaactgcttacctggcgtgaagagaccggcaaaaccgccttcgaaaccgcgccgcaatatgaaggcaaaatcggcgagcaggagtacttcgataaaggcgttctgatgatcgcgatggtgaaagcgggcgttgaattggccttcgaaaccatggtggcctccggcatcatcgaagagtctgcttactacgaatcactgcatgagctgccgcttatcgccaacaccatcgcccgtaagcgtctgtatgagatgaacgtggttatttccgataccgctgaatatggtaactacctgttctcttacgcttgcgtaccgctgctgaaagagttcatgaccaccctgcagaccggcgacctgggcacagcgattgccgaaggcgcggtagataacgcgcagctgcgcgatgtgaacgaagcgattcgcagccacgctatcgagcaggttggtaagaaactgcgcggttatatgaccgatatgaagcgtatcgcggtagccggctaattcctcgtcgtctttcgacttgccgatgcgttggctacggtacgtacaccccagtcacatagtaatctttgttcctggggatgtacttccttgccgccttccggcaagccgaaatccatagaggcatggatttgtttagtaggcctgataagcgaagcgccatcaggcaaaaacccggagattaagatccccgggtttttttattatttccggtacagcactttgatgatgtggtagccgaactgggtatgcagcgggccggttggctccagttcagggcaggagaagaccactttatcgaaggccggtaccatctggccctggcggaactcacccagatcgccgccgcgtttgcctgacggacaaatggagtgtttctttgccagcttgccgaaatcggcgccgtttttgagctgctcgagcagatcgagcgccagtttctcttcttttaccaggatatgcagtgctgccgcggttttagccatgattgcgccttgagtgagttgggataaatcagggcgccatagtatcacgcgctagcggcgatacagcaccttgatgatgtggtagccgaatttggttttcaccgggccatagggtttgagcagcggacagctgaagacggcttgatcaaacggaccgaccatcgcgccttgctgaaactcgcccaagtcgccgccgttgcggccagacggacatttagaatagcgtttcgccagatgatcgaagctgacgccccgctccagtttggcgaggatctccagcgccagtttctcttctttgaccaggatatgcagggccgctgcgctttttgccatgacatcattctcaggatggtttgcgtggctgacactttaccatcagtcagtaaatctcggctccgctttctgctacaatccccaccccgttcgaagattgagcaagactcccatgcgtttaaaccctggccaacaacaagccgtcgaattcgtcaccggaccgtgcctggtgctggcgggcgccggttccggtaagacccgcgttattacgaataaaatcgcccacctgatccgcggctgcggctatcaggcgcgccatatcgcggccgtgacctttaccaacaaagccgcgcgcgagatgaaagagcgcgttgggcaaacgctggggcgcaaagaggcgcgtggcctgatgatttccaccttccacactttggggctggatatcattaagcgcgaatacgctgcgctgggtatgaagtctaacttttccttattcgacgataccgaccaggtggcgctgcttaaggaactgaccgaagggttgatcgaagatgacaaagtggtgcttcagcagctgatctcgacgatctccaactggaaaaacgatctaaaaaccccggcgcaggccgccgctggcgcgaaaggcgaacgggatcgtattttcgcccactgctatgggctatacgacgcgcacatgaaggcctgcaatgtcctcgattttgacgatctaatcctgctgccaacgctgctgctgcagcgcaacgaggaggtgcgcgagcgctggcaaaataagatccgctacctgctggtagatgagtatcaggataccaataccagccagtatgagctggtgaaactgctggtgggtcagcgggcgcgctttaccgtggtgggcgatgacgaccagtcgatctactcctggcgcggcgcgcggccgcagaacctggtgctgctcagccaggacttcccggcgctgcaggtgatcaagcttgagcagaactaccgctcatccgggcgtattctgaaagccgccaacattttgatcgccaataaccctcacgtctttgaaaagcggctgttctccgaactgggatatggcgcggagctgaaagtgctctccgccaacaatgaagatcatgaagcggagcgcgtggccggggagctgatcgcccaccacttcattaataaaaccaattacaaagactacgcgatcctttatcgcggcaatcaccagtcgcgggtctttgaaaagatgctgatgcagaaccgcatcccgtacaaaatctccggcggcacgtcgttcttttcgcgtccggaaattaaagatctgctggcctatctgcgcgtgctgaccaacccggacgacgacagcgccttcctgcgtatagtcaacacgccgaagcgcgagatcggcccggcgacgctgcaaaagctcggtgagtgggcgatgggccgcaacaaaggattgttcaccgccagctttgatatgggtctcagccagacgctgaccgggcgcggctatgaatccctcacccgcttcacccactggctacgcgagatccagcagctggccgaacgcgagccggtcaacgccgtgcgcgatttgattcgcgggatcgactacgaatcctggctatatgaaacctcgcccagcccgaaagccgcggaaatgcgcatgaaaaacgtcaaccagctgtttacctggatgaccgagatgctggaaggcagcgaaatcgatgagccgatgaccctgacccaggtggtcacccgctttaccctgcgcgacatgatggagcgcggcgaatcggatgaagagctggatcaggtgcagctgatgactctccatgcgtcaaaggggctggagttcccctacgtttatctggtgggaatggaagagggattgctgccgcaccaaagcagcattgatgaagataacgtcgatgaagagcgacggttagcctacgttggcatcacccgtgcgcagaaagagctgacctttacgctctgtaaggagcgccggcaatatggcgaactggtgcgtcctgaaccgagtcgttttctgctggagctacctcaggacgaccttatctgggagcaggcacgcaaaaccattacgcctgaagagcggatgcaaaaaggccaggccaacgtcgctaatattcgggcgatgctggcaaaggcgaaaaaagcttagcgtctcaggcgataaactgctgccaggcggcggagaagggcatcaccagtattagcgagggcagcatattggcggtagggaaggcacggatcccgcacagacggaaaccggtcgccagcataatgatgccgccgcaggcggtgaagtcggcgatcatcgacggattgattaacgccatgataaaggttgccgcgaaaaacaggataacgaaaacaatcagctggggaataaagatcacggtgatgatataccccagcgtggaggcgaaaatcgcggcagtaaaaaagtcgaggatcgacttggtcagcagaatggtcgggtcgccggtcatcccttcggttaaggcgccgaagatgccggtaccgctggcgcagaacaggatcagcacggcgataaactgattcataaaatcttccgcaccgacgctggcgctggactgcgccggaaaaatacgttcaatggggctgcgcagcgttgttccggctcgttcaatccatttttcaatattcaacaggccgccgataatcgtgccgacaataatagccagggcaatcggcggcaggttatgcaatttattgacaaagaatatgcccatactgattgagatcagtccggcgatcaacggtaaggtttttttgaaatgttccggaataaaacgattcagtgaagcgcccgccagcgcaccaacgagaagcgagccgctacagacaaatatacctatagccataatttattttccctaataaaaatcagggcctgaatatacaggccctgaaatatttaaattaattatttaatgttaaatacgcggctggcattaccccaggcgattttctctttcaggcctgcttcaagttctaaaggatcaaaccagtcgcaggcctgatgaatatcttcatacggataatcgacagagaacatcacgcgatcggcgcccatgacttcaatagcattattcagtgaatgggtattgaaatggccgctggtggtaacgatgaagttattctgcaggtagtgcattaacggtttttccgctttacccagaccgcagccgaaacgctgacgatagagacgatgttgagtgcgcggcagcatatgtaccagcccttcgccgaggtgacccagcaccagattgaggttaggataacgatcgaacagaccgctcatcatcagacgaatagcatgcactgccgtttcctgagcgaagccccaggcggagccgatcaggctttcgtaaccggtatagatgccgcgcgccgggccttccagcggttcacgaggatgcagatagacaggcacgttcagctcgttgaccttatcccagaataccagcatggattcgtcatcaagatacaggccatgctcgctatctttaacgttggtgtagccgttgatcagcgcacctttcatgcctaactttttcacggcgcgctccagctcttccgccgcggcttccgggttctgcaatgccagggtggcgaaggcgctgaatttgtccggatttggcttaacataattctcaacgataaaatcgttggtatcgcgggcaaaagagacggctttggctttatctaaaatagactgggcgccaggtgaagtcagagaaagaattacatgatcaatatgacgctgcgccatttcttccagctgaatgctgcgatccagcaggcggcgttcaacatctttcatatattctgtgccgttacgacctgcttcaccagatgaatcccacagacggttattttcaggagtggatacgtgttcttctaaagcaatttttccgcgcatgatattttccttgcgatatgtgtcagtgtggcttgatgcgaggagaataaaagctttcacgtattaccagcaataaaccaaacgtaataggggttattaataaaaccaatacacgggcgtaatttgttacttagattttaatagaagtactctgctgtgcgggatcggcaagcgtagcgatcagcgagcgtagccagatatgtccgggatcgcggtgcagccgctgatgccagacctgacggatggcgattttggcgaggggaaaaggcagcggccagctgcggcagggatagcgccgggtgatatgccgcgccacctgttccgggacgacggcaatcatatcgctttcggccaccagctcaccggtacctaaaaaacttggtaacgttagcgcaatgcgccggggcatgtggtgctcatcaagcagcttatccatatcgccatgggcagtcccctccacgcggatcgccagatgcttttcctggcgccagtcttcggcgcggagctgtgcacgaatgcgaggatggttttccgcagccaggcagacatatgattgatcgaagagatgttgctggtagacgctttccggaagctgcgtcagatagccgatcgcgagatcgcatttcccggattcgagggcgttgagggtctgctcatccagattctgtaccgtaaaggtgatcccgtccgccgcctgctgctggagcgcaatttgcaataaaggcagcagcgtcatttggctgatatcggtcataccgatcgtaaaattacgctggctctgctggggaagaaattcaggtttgaccgctaaatcgttatcggcaagctggagaagagtcgagatggtgggggcgatcgcgtccgctcgcggcgtcgggatcatccgctgcccgacccggacaaacagcgggtcagcaaaatgatctcgtagttttttcagcaaaaggctgccggtgggctggctgatatcgagcgcgtccgctgctggggaaacattgcccaagcggtagagcgcagagaaaaagcgtagcgatttgaaatccagttcttcccgcatccgccctcctggctggatattatttcagcgtatcgccgctggcgacccgaagtatccagtggacgtagctttgccactgacactcctgatcgaccatctcccgacccagcggatgttcatccagccagtttcccggcaatatcagcgtcagttgttcgtcttgagcggtcagctgaatggcgggcaacagatcgtcgcgccgccggctggcaaacaggattgccagtcgcagcagacgacacagatgctcagccacccgcggtgggacggcattctgttgatgaagcgaagagaggtcgatagcgttagtctggttaaggagcagcgtggcaatcagcttcttctgcgccggggtaaagcccggcaggtcgaggttattgaccagataggcggcgtgctgcggcgcgcgcttaaaatccacgctcagcccaatctcatgcagcgcacaggcgctaaggagtaaatcacggcttagcggatccagctcccagctgccatccaactgactgagcagatgactggcaaggccgccgacgcgctgggcctgttcggtgtcgatcataaaacgacgctgaatattacgcagcgtgcggctgcggatgtcctgctcaacggagagatgcagcatgccgtacaccaggccttcgcgtaacgcgccgcccgcgagggtcatacactgaatattcagttcgctgaagatagcgatcaggatcgccagcccgctaggaaacaccagcgcccgctcaagggttaagccttcgatctccagctcttccagacgtccgcactggatagcgcgctgtttaagctgctggagtttggcgagggtgattcgttcatccatcccctgtgccatcataatttcctgcagagcctgaacggtgccggaggcgccaacgcacactttccatccgtgatagcgcagcacatcggcgacgggcagtagcacctcgcgcgcagccgcttcggcgagatcgaaattctctttcgtcagactacggtcggcaaaatagcgttcaagccaggtgacacagcccatcgacaggctaaacagcgaggttgtttgtgcgccggtcccggtcaccagctcggtgctggcgccgccgatatcgaccaccaggcgctgatcggcgccgccggtggtgtgggcgacaccctggtaaatcaggcgcgcttcttcttcgccgctgatcacttgcactggagtgccgaggatctcctgcgctttcgccagaaactcccccgcattgacggcaagacgcagcgtggcggtggccacgacgcggatttgcgtcggcggaatatcctgcaggcgctcggcaaacaggcgtaagcactgccagccccgttccatcgcttctgcggagagggtgttgtcgctattcaggccggcggccagtcgaaccttacgcttaatgcggctcagcgtctggatgctgcccgccacctcgcgcaccaccaacatatggaaactattggagcccaaatcaatggcggcatatagcgaggtggagctcatactcttcatcgttcagaaggctccctggtcggcggggcgcttaggcccgatccacatcactgagcgggtcgccagaggaaggtcgccctggcagattctgaatgactgagcgtatggcatagatctcttaacctgaacgacgacgattgcgcggtggaccgttacggcgcgggccgttgcctgggcgcgcacgggtcagacgcagcggtttaggcaggtcggtcatcagcgcgtccgggttgtacttactgaccggaattgagtgaccaatataggtttcgatcgccggcagattcagcgcatactcttcgcaggcgaggctaatggagtgaccgctggcgccagcgcgaccggtacggccgatgcggtgaacgtaatcttcgcagtcgtccggcagatcgtagttaaagacgtgggtcacggccggaatgtgcaaaccacgagcggcaacatcggtcgcgaccaggatatcgaggtcgccgcgggtaaattcttcgagaatacgcagacgttttttctgcgccacgtcgccggtcagcagacctacgcgatggccgtcggcggcgagatgcccccagatatcttcacaacgatgcttggtattggcgaagacgatggcgcgatcgggccactcttcttccagcagcgtctgcagcaggcgcattttttcttcgttggacgggtagaagagctcttctttaatacggtggcccgttttctgttccggctcgacttcaacgtactcggcgttattcatttgttcgaacgccagttcgcggacgcgataagaaagggtcgcggagaacagcatgttcaggcgctgagtggccggcggcatgcggcggaacagccagcggatatctttaataaagccgagatcgtacatgcgatcggcttcgtccagcacgacaacctgaatggcgccgaggttaatgtggttctgcttcgcgtaatcgatcagacgaccagtggtaccgatcagaatatcgacgccgctttccagcactttcagctgcttatcgtagccgtcgccgccgtaagccagacccagcttcagaccggtggcctgcgccagtggctcagcgtcggcgtggatctgtaccgccagttcacgcgtcggcgccataatcagcgcgcgcggttggttaacctggcgatcggcgatagccgggtgagagagaagataatgaaacgttgacgtcaggaacgccatcgttttaccggtaccggtttgcgcctgcccggcgacatcgcggccttccagcgtcagcggaagggcgagggcctgaatgggtgtgcaattatgaaaccctttcttttcaagggcttcaatgactgccgggtgcagggcgaagtcggaaaacttctgttctgttaaatgtgttttgctcatagtgtggtagaatatcagctaactattgcattaagaaagcgtatccggtgaaataacgtcaacctttcgttggcggtgtacgaaattattcaaggtacgtctacggtaactgaacgaatccaggatagcttagactactaagcgagtcgggagcgataaatctgcagcatgcagttcgcgttcaggcaccctggcgtcaacaggcgagtccatgatggattgcgccagttggcaggccagagaattgaggtatcctgaagaatagcgtgcataacgtagccgcagcgcgtcgttgatggctacgacaccaacacaccaggcttattcctgtggagttaaatatgagcgataaaattattcacctgactgacgacagttttgacacggacgtactcaaggctgacgggctgaccctcgtcgatttctgggcagagtggtgtggtccgtgcaaaatgatcgccccgattctggatgagatcgctgaagagtatcagggcaaactgaccgtagctaagctgaacattgaccagaacccgggcactgcgccgaaatacggcattcgcggtatcccaaccctgctgctgtttaaaaacggcgaagtggcggccactaaagttggcgcactgtccaagggtcagctgaaagagttcctcgacgctaacctggcgtaagcgaattgctgttccggcgtccagattcctattttttgcggaactctggacgcccggctggagtcgtgctaagttaatccacagacttcgttttaaacataccttgtttgaatcttgttttacccgaagcatcccgcataaatgcgcgtgaagctaataattccgggcttttcactcattccgtctagtcgtttcagttctgcgttctttcctgtgaccaggcaacgtacagacacgagatgaaggccgttaacaggcatggaagttcctgccataccattcacaacattaagttcgagatttaccccgagtttaagaacccacaccactatgaatcttaccgaattaaagaatacgccggtttctgagctgattactctcggcgaaaatatggggctggaaaacctggctcgtatgcgtaagcaggatattatttttgccatcctcaagcagcattcgaagagtggcgaagatatctttggcgacggcgtactggagatactgcaggatggatttggattcctccgctccgcagacagctcctacctcgccggccctgacgacatctacgtatcccccagccaaatccgccgtttcaacctccgcactggtgacaccatttccggtaagattcgtcctccgaaagagggtgaacgttactttgcgctgctgaaagttaacgaagttaactacgacaagccggaaaacgcgcgtaacaagatcctgttcgagaacttaacgccgctgcacgcgaactctcgcctgcgtatggagcgtggtaacggttctaccgaagacttaaccgctcgcgtactggatctggcctccccgattggccgcggccagcgtggtctgatcgtcgcgccgccgaaagccggtaaaaccatgctgctgcagaacatcgcgcagagcatcgcatacaatcacccggactgtgtcctgatggtactgctgatcgacgaacgtccggaagaagtgaccgagatgcagcgtctggtgaaaggtgaagtggttgcttccacctttgacgagccggcatcccgtcacgtgcaggttgccgagatggttattgagaaagcgaaacgtctggttgaacacaagaaagacgttatcatcctgctcgactctattacccgtctggcgcgtgcctacaacaccgtggttccggcttccggtaaagtgttgaccggtggtgtggacgccaacgccctgcaccgtccgaagcgtttctttggtgcggcacgtaacgtcgaggagggcggtagcctgaccatcatcgccacggcgctgatcgacaccggttccaaaatggacgaagttatctacgaagagtttaaaggcaccggtaacatggaactgcacctctctcgtaagattgctgaaaaacgcgtcttcccggctatcgactacaaccgttccggtacccgtaaagaagagctgcttaccactcaggaagagctgcagaaaatgtggatcctgcgcaaaattatccatccgatgggtgagattgatgcgatggaattcctcatcaataagctggcaatgaccaagacgaatgatgacttcttcgatatgatgaagcgctcgtaaggtaaaaaaagccaaaaacgccacgcctttgcgtggcgttttcattttggggtttgtatgatccagagacagagaaagcgggacgaaagttgtcgtataatggcgccggatagcaggcggagacagctttaacagactaaaatctatacaataaatttgtaatgttctgcttttccccttctggagttggggcatcatcgctatacttcccggattaactatgctgagagcacatgcgttgtgaatttactcactgctattactgaattaatcagtattttcttattcacgaccctctttatttttgtcgcgcggaaagtggcaaaaaagatcgggttagtggataaacccaactatcgcaaacggcatcaggggttgattccgttggtcggtggtatctcagtttatgcaggtatctgtttcactttcgccatcgccgattattatattcctcacgcctcgctgtatctggcctgcgcggggtattggtgctggttggcgcgcttgacgatcgcttcgacatcagcgtgaaaattcgcgcggtcattcaggccgcgatcgccgtgattatgatgatggcagggaatctgcatctgagtagtttgggctttatttttggatcgtgggaactggtgctggggcccttcggcttcttcctgacgctgtttgccgtctgggccgctatcaatgcgttcaacatggtcgatggtatcgacggcctgctcggcggactgtcatcggtctcttttgcggcgaccgggattatcctttggtttgatggtcagtacagcctggcgatgtggtgtttcgcgatgatcgccgccattctaccctatattcttctcaatcttggcgccctcggccgccgctataaagtctttatgggtgacgccggcagcacgatgattggcttcaccatcatctggatcctgctggaaaccacgcaaggtaaaacgcatcccattagcccggtgaccgcgctgtggattatcgctatcccgctgatggacatggtggcgattatgtatcgccgcctgcgcaaaggcatgagtcctttctcaccggaccgtcagcatattcatcatttgatcatgcgcgccgggtttacttcccgccaggcgtttgtcctgattaccctggccgccgccctgctggcgctggttggcgtcgtggcggaatacacccgcattgtgccggaatgggtgatgttaattctctttttggtagccttctttctttatggctactgtattaagcgcgcctggaaagtggcgcgcctggttaagcgcatcagacgcagaattcggcgacacagcggcaataatccgaaactaaccaagtagagctggggatgtgatgactcaaccattaccgggagcacaagcagtgaacgttgagaacgagctggatattcgcgggctgtttcgcgctttatgggcaggaaaaggctggatagtcggcggcgccgtactcttcgccgccatcgtgctggtgtacaccttctttgctcgccaggagtggagcgccacggcgatcaccgatcggcctactgtcaatatgttggggggatactattcccaacagcagttcttacgcaatctggacattaaagccgacctcgcctcggtcgaccagccttccgccatggatgaagcgtataaagagttcatcatgcagctggcctcctgggatacccggcgcgatttctggctgcaaacggactactacaagcagcgtcagtcgggtaatgcccgcgctgatgcggcgatgctggatgacctgattaacaatatccagtttatgccaggcgatgcggccaagagcattaacgacagcgtcaaactgaccgccgagaccgggcaggatgccaataatctgttgcgtcagtatgtggccttcgccagccagcgggcggcaggccatcttaacgacgaacttaaaggcgcctgggcggcgcggacggtgcagatgaaggcgcaggtgaagcgccaggaagaggtggccgaggccatcttcaaccgccggacgcacagcgtggagcaggcgctgaaggtggctcagcagcacaatatttcacgtagcgaaacggatgttcctgccgatcagttgccggattcagagctatttttattgggcaggccgatgctgcaggccaggctggaaaacctgcaggccgtcgggccggaatatgacctcgattacgaccagaaccgcgccatgctgagcacgttgaacgtcggtccaacgttagatccgcgttttcagacttaccggtatttgcggacgccggaagaacctgtaaaacgcgatagcccgcgccgtgtatttctgatggtgatgtgggggattgtgggtgcgctcatcggcgcaggcgtggcgttatcgcgtcgtcgtgtcctgtgattgcggcctgtggtgaagggcagatgaccttcatcgcctaatcgaagagaatcgatgtgaaagtactaactgtatttggcacgaggccggaagccatcaagatggcgcctctggtccatgcgctggcaaaggatcctcattttgaggcgaaagtatgcgtgaccgcgcagcatcgggagatgctcgatcaggtgttgaaacttttctctattgtcccggactacgatctcaacatcatgaagccggggcaggggctgaccgagatcacctgtcgcatccttgaagggctgaagccggtgctggagtcgtttaaacccgacgtggtgctggtgcatggcgataccaccaccaccatggcggcgagcctggcggcgttttaccagcggataccggtgggtcacgtagaggccggcctgcgcaccggcgatttaagttcgccgtggccggaagaaggcaaccgtacgttgaccggccatctggcgacataccatttcgcccccacggaaacctcgcggcagaacctgctgcgggaaaatattgccgacagtcggatcacggttaccgggaatacggtcattgacgccctgttctgggtgcgggatcgggtgctgggtgatgaagcgctacgggagaccctgctgcagcgctatcctttcatcagccacggtaaaaagatgattctggttaccggccaccggcgggaaagctttgggctcggttttgaacagatctgccaggcgctggccgagatagcccatacccaccctgaggtgcagattgtctatccggttcacctgaatcctaatgtcagcgagccggtgaatcgtattcttggtcatattgacaatgtgatgttgattgaaccgcaggattacctgccgttcgtctggctgatggatcgcgcctggctgatcctgaccgattccggcggcattcaggaagaggccccctcgctgggtaagccggtgctggtcatgcgcgatatgaccgaacgtccggaagcggtggccgccggcaccgtgtgtctggtgggcaccgacagccagcgcatcgtcgcggaagtgacgcgactgctggaggatgatgctgcataccaggcgatgagccgcgcgcataatccctatggcgatggcgaagcatgtcgtcgcattttgtctgcacttaaaaataatcaggtaacgctatgagtttttctaccatttcagtgattggccttggctatatcgggctgccaaccgctgccgcgttcgcctcccggcagaagcgggtggtcggcgttgatgttaatcaacatgccgtggagaccattaaccgtggagagattcatatcgtggagccagatctggcgagcgtggtgaagaccgcggtcgagcaggggtatttaagcgccgccaccaccccggtggaggcggatgcttacctgattgccgtgccgacgccgtttaaagatcgccacgagccggatatggtgtttgtcgagtcggccgccaaatccattgcgccgacgttaaagaaagggtcgctggtgatcctcgagtccacctcaccggtcgggtcgaccgaacagatggccgagtggctggcggagatgcgcccggatcttagcttcccccagcaggtgggtgaagcggcagacgtgaatatcgcctactgcccggagcgggtattgcccggtcaggtgatggtcgagctgattaaaaacgaccgcgttatcggcggcatgtcgccggtctgctccgctcgcgccagcgagctgtataaaatcttccttgaaggcgaatgcgtggtgaccaactcgcgcaccgccgagatgtgcaagctgacggaaaacagcttccgcgacgtcaacatcgcttttgccaacgaactgtcgctgatttgcgccgaccaggggattaacgtctgggagctgatccgcctggcgaaccgccatccgcgcgtcaatatcctgcagccgggcccgggtgttggcggccactgtatcgccgtcgacccatggtttatcgtggcgcaaaacccgcagcaggcgcgtctgatccgcaccgctcgcgaggtcaacgaccacaagccggaatgggttatcgaacaggtgaaagcgcaggtggcggactgcctgaatgccgccaacaagcgggccagcgaactgacgatcgcctgttttggcctcgcttttaaaccgaatattgacgacctgcgcgaaagtccggcgatggaaattgccgcgcagattgcccgctggcacagcggcacgacccaggtggttgagcccaacattcacgcgctgccgaagaaactcgatggactgtgtacgctggcgacccttgaggcggcgctggccagcgccgatgtgctggtgatgctggtcgatcataaccaatttaaagccgttagcggcgatagcgtcacccaggcgtttatcgtcgacaccaaaggagtgtggcggtgagaaccattctggtcaccggcggcgcgggcttcattggttcggcggtagtgcgggagattatccagcacaccgccgatcgcgtggtggtggtggataaactgacctacgccggcaatttaatgtcgctggcgccggtggcgcaggatgcgcgtttcgcctttgaacaggtggatatctgcgaccgcgccgagctggatcgcatttttcgtcagcatcaaccggatacggtgatgcacctggcggcggaaagccatgtcgatcgttcgattgacggcccggcggcgtttatcgagaccaatatcgtgggcacctatacgctgctggaggcggcccgtagctggtggaataccctggctatggcgcaaaaatcggcgtttcgcttccatcacatctccaccgatgaagtgtatggcgatctgcacggcagcgatgatttctttaccgagaccacgccctatgcgccaagcagcccctattcggcttcgaaagccagcagcgaccacctggtgcgcgcctggctgcgaacctatggcctgccgacgcttatcaccaactgctcaaataactacggcccgtatcactttcccgagaagctgatcccgctgacgatccttaacgcgctggcgggcaagccgctgccggtgtatggcaatggacaacagatccgcgactggctgtacgtggaagatcacgccagagcgctgtatctggtggcgacccgcggcgaaccgggcgaaacttacaatatcggcggtcataacgaacggaaaaatatcgaggtggtggaaaccatttgtcagctgctggaagagctggcgccggataagccgcagggcgtggcgcactatcgcgatctgatcgccttcgttgccgatcgtccgggccacgatctgcgctatgccattgatgcttcgaagattgcccgcgagctgggctggacgccggcagagactttcacctccggtatgcgtaagaccgtggcgtggtatctggcgaacgaggcctggtggcgtcgggttcaggacggaagctatcagggcgagcgtcttgggctgcaaagctaatcatctctggggggaatgatgaaaggtattattctggcgggcggttccggaacgcggctacatcccatcacccgcggcgtatcgaagcagctgttgccgatctacgataagccgatgatctactacccgctgtcggtattaatgctggccgggatccgtgagatcctgattatcaccacgccggacgacctacgtgatttccagcgcctgctcggcgatggctcagagtttggcattgcgctgcactatgccgtacagccgacgccggatggtttagcccaggcgtttatcatcggagaagcctttcttaacggcgaaccggcgtgtctggtgttaggcgacaatatcttcttcggccaaagctttagcccgaagctgcgcagcgtcgctgcccgcacggaaggggcgacgatttttggctatcaggtgatggatcctgagcgctttggcgtggtggagtttgatgataacttccgtgcgctatcgctggaagagaagccgaagcagccgaagtcgaactgggcggtcaccggtctctatttctacgatggcaaggtgacggagtatgccaaacgggtcaagccatccgagcgcggcgagctggaaatcacctccatcaaccagatgtatctggaggatggcgcattgaccgtcgaactgcttggacgcggctttgcctggctggacaccggcacccacgatagcctgatcgaggccagcatgttcgtgcagaccgtcgagaagcgccagggctttaaaatcgcctgtctggaagagatcggctggcgtaacggctggctggacgacgacggcgtcaaacgtgcggcgaagcggctggaaaaaaccggctacggccaatatctgctggatctgctccgtgcccgtccgcgccagtattgaccccctggagtgggagaaccgcttctttgccgtgaacagcgcgatcgtgcgctttgacgagcacgcgccgcggctgacgcctgaggcgctggcggggtggtcgcgagtgcaggcgaagatcgccgccagcgacaccgtccggctggacgcgctgcagcggctgggttttcagctggtggaaggtgaggtcgatctggcgctgccggtgggcagccctgcagatgccggcgcagacgtcgccgtggaagcggatattgcgccgctgcgcgagcaggcggcgcaggcatttgccatgagccgctttcgcgcgccctggtacgctgccgacgccagcggccgcttctatgcccagtggattgaaaatgcggtgcgcggcaccttcgatcatcagtgcctgatttaccgccatcctgagggcgatattcgcgcctttgtctccctgcggcagatcactgcgaccgaagcgcgtatcggcctgctggccggacgcggcgccggggcgcagttgatgcaggcggcgcggtactgggccgcctcgcgcggactttctacactgcgggtggcgacccagatgggcaacaccgccgcgcttaaacgttatattctcagcggtgctaacgtggaaagcaccgcctactggctatacaggtgacccccatgatcccatttaacgcgccgccggtggttggaaccgagcttgattacatgcagtctgcgatgaacagcggcaagctgtgcggcgacggcggctttacgcgccgctgccagcagtggatggagcagcgatttggcacggcaaaagcgctactgaccccttcctgcacggcttcgctggagatggccgcgctgctgctggatatccagccgggcgacgaagtgattatgcccagctatacctttgtctccaccgccaacgcctttgtgctgcgcggggcgaaaatcgtcttcgttgatatccgtcgcgatacgatgaatatcgacgaaacgctcatcgaagccgccatcaccgataaaacccgggcgattgtcccggtgcattatgccggcgtagcctgcgagatggacaccatcatggccatcgccgacaaatacaacctgtttgtggtggaagacgccgcgcagggggtgatgtccacctacaaggggcgcgcgctgggcaccatcggccatatcggctgcttcagcttccatgaaaccaaaaactacaccgccggcggtgagggcggggcgacgctgatcaacgatcgcacgctggtggaacgcgcggagattattcgcgaaaaaggcaccaaccgcagccagttctttcgcggcctggtggataaatatacctggcgggacattggctccagctatctgatgtccgacctgcaggccgcctatctgtgggcgcagctggaagcggcggagcgcatcaaccagcagcgcctggccctgtggcagaactactatgatgcgctgctgccgctggcgcgcgccgggcgtatcgaactgccgacggttccggccgactgcgggcaaaacgcgcacatgttctacattaagctgcgtgatatcgaggatcgcagcagactgatcgcctggctgaaagaggcggagatcctcgcggtattccattacattcccctgcacagctgcccggcaggcgaacagttcggcgaattccgcggtgaagaccgctacaccactcaggagagcgagcgtctggtacgcctgccgctgttttacaatctgtctgtggtgaaccagcggacggtgattaactcgctgctgagctacttctcctgatatgtcgttagcaaaagcctcactgtggacggcggcatcgacgctggtcaaaatcggcgccggtctgctggtcgtcaagctgctggccgtctcgtttgggccggcgggcgttggccaggccggtaacttccggcaactggtcaccgtactcggcgtgctggccggggccgggatatttaatggcgtcacgaagctggtggcgcagcatcacgacgatcccccgcgcctgaagcaggtggtgggcacctcgtcggcgatggtgcttggcttttccaccctgctggcgctggtatttttactggcggcggcgccgataagccaggggctgttcggccatacgcactatcaggggctggtacgcctggtggcgctggtgcagatggggatcgcctgggcgaatttcctgctggcgctgatgaaaggctttcgcgatgcggcgggtaacgccttctcgctgattgccgggagcctgatcggcgtggcggcttactatgcttgctacgtgttgggaggctatcagggcgcgctgctggggctggcgttagttccagcgctggtggtggtcccggcgggtattatgctctggcggcggggtaatatcccgctgagcgccctgcgtccgcgctgggataacggtctggcgggacagctatcgaaatttaccctgatggcgctgataacctcggtgaccctgccggtagcctatgtgatgatgcgtaatctgctggcggcgcattacggctgggaggcggtcgggatctggcagggggtgagcagcatctccgatgcctacctgcagtttattaccgcctcgtttagcgtctatctgctgccgacgctgtcgcggctgagcgccaaaatggatatcacccgcgagatagtcaagtcgctgaaattcgtcctgccggcagtagcggcggcgagcctgacggtctggctgctgcgcgattttgccatctggctgctgttttccgatcgctttaccgcgatgcgtgacctgtttgcctggcagctggtgggcgacgttttaaaagtaggtgcttacgtctatggctatctggtgatcgccaaagcgtcgctgcgtttttatattctgacggaaatcagccagttcgcactgctgaccgcattctcacactggcttataccggcgcacggcgcggttggcgcggcgcaggcatatatggccacttatattgtttatttcgccctttgtagtggcgtgtttttactctggcgtaaacgggcatgacagcactgatacatgtactgggatcggatatcccgcatcataaccagaccgtactgcggttctttaacgacgaactggccgccgacccgcaggccaggagatttatgatcgtcggtgatgaggccagcgtgcgtgatgggtatccggcgctggatgtcacctgttatccggggaaaaaggcgctggcgcaggcagtgattgctaccgcgaaagccaaccgccagcagcgctttttcttccacggccagttcaataccgggctgtggctggcgctgttgagcggcggcatccgcccgtcgcagtttaactggcatatctggggggcggatctgtatgaaaattctgccagcctgaagtttcgcctgttctatccgctgcgccgtatggcgcaggggcgggtagggcgcgttttcgccacccgcggcgatctcagctggttcgctaaccgccatccgcgcgtcccgggcgagctgctctacttcccgacccgtatggatccggcgctgaataccctggccgataacgctccgcgcggtgataccctgactattctggtgggcaactccggggatcgcagcaatgaacatattgccgcgctgaaggcaatccatcagcagtttggcgatacggtaaacgtcatcgtgccgatgggctatccagcgaataacgacgcctatatcaatgaggttcgcgaggcgggggcggcgctgtttagcggtgagcatctgcagatcctcagcgagaagctggagtttcatgattatctggcgctgctgcgccgctgtgatctgggctattttctgtttgcccgccagcaggggatcggcaccctgtgtctgctgattcaggcgggcatcccctgcgtgctcaatcgggaaaacccgttctggcaggatatggccgagcagcatgtgccggtgctgttcaccagcgacgcgctggacgtcagcgtggtgcgcgaagcgcagcgtcagctggcgagcgtggataaatccgctatcgccttcttccggccgaactatctgacgggctggcggcgggcgctacggttagcggcggaggggcaggcatgacgttaatgcaatttagcgggctgctggtggtctggctgctgtcgacgctgttcatcgccaccgccacctggtttgagttccgtcgggtacgctttaacttcaacgtttttttctcgttgctgtttctgctgacctttttcttcggcttcccgctgaccagtattctggtgttccgctttgacgtcagcgtggcgccgccggagattttgctgcagacgctgctgatcgcggtgtgcttctacgcagtctactacgtgacctataaaacgcggctgcgttcggcatcgcgtgaggttgcgcatcgcccgctgtttaccatgaaccgggtggaaacccatctggcgtggggcattttgatggggctggcgctgctgtgcgtcggcatcttcttcgcccacaacggtttcctgctgtttaagctcaactcctacagccagattttctctgctgaagtgtccggcgtggcgttgaagcgcttcttttacttctttattccggcgatgctggtggtctattttctgcgccaggattataaggcgtggatcttcttcctcgtcagcacggtggcctttggtttgctgacctacgccatcgtcggcgggacgcgcgccaatattatcatcgccttcgccatctttctgttcatcggtattattcgcggctggatcagcctgtggatgctggcggcggcgggtgtgctgggtattgtcggcatgttctggctggcgctgaagcgctacgggatgaacgtcagcggcgacgaagcgttttatacctttctgtatctcacgcgcgacaccttctcaccgtgggagaacctggcgctgctgctgcagaactacgaaaagatcgatttccagggtctggcgccgatgatccgcgacttctacgtctttatccccagctggctgtggcacggtcgcccgacgatggtgctcaataccgccaactactttacctgggaagtattaaacaaccattcggggctggcgatctcgccgacgctgattggctcgctggtggtgatgggcggcgtctggttcgtaccgctgggcgccgtggcggtagggttgattattaaatggttcgactggctgtatgagctgggcaaccgggagagcaatcgctataaagcggctatcctgcacagtttctgtttcggcgctatcttcaacatgatagtgctggcgcgcgaggggctggattcgttcggctcccgcgtggtgtttttcctcgtgatctttggtatctgcttgctggcggcgaaactgctgtactggttcctggatagcgtgggactgattcataagcgcgtaaaaccgctttcgcaaccgcaagtctgagaaggatggacatgactgggaccatttccgcgccgttgtacctgttaagagggctgcagctcataggctggcgcgatatgccgcacgctctggattatttgtttgccgacggcgcgctccgggaggggacgctggtagccattaatgctgagaaaatgctggccgtagaggataacccggaggtacgggcgctgattgaggcggcggagtttaaatatgccgatggcatcagcgtggtgcgttcgctgcgcaaaaaatacccgcaggcccaggtatcccgcgtcgccggggccgatctctgggaagcgttaatgcagcgcgccggcgctgaagggacaccggtgtttttggttggtggtaaacctgaggtcctggcgcagacagaatccaggctgcgtcagcgctggcaggtgaacatcgtcggcagccaggacggttatttcacccctgagcaacgccaggcattgttcgaacgcattcgcgacagcggggcgaaaatcgtcaccgtcgcgatggggtcgccgcgccaggagatctttatgcgcgactgccggcgcctgtatccgcacgcgctgtatatgggcgtcggcggcacttacgatgtttttaccgggcacgtccatcgggcgccgaagttctggcaggatctggggctggagtggttctatcgcctgcttttgcagccgagccgtatcaaaagacagttccgtctgctgcgctatttacgttggcattattccggtaagctctgatattccactgcaaccaggcgagtttgcatacatattctgtgtaatctcttcactcgcctgatactttatttgccatttccgcaaaattaattaaccattcgcaggcttcatacgcgccggggagacctgcgcgtcggcaaggctatggtttcagttaataacaataaccgggagtacccggaatacggcaaacacaagaggatatatgactgagaaaaaagcggagctccagcgtggactggaggcccggcatattgaactgatcgcccttggcgggacgattggcgtggggttgtttatgggggcggccagtaccttgaaatgggctgggccttccgtgctgctggcgtatattatcgctggcctgttcgtctttttcattatgcgctcaatgggcgaaatgctgttccttgagcctgtcactggctccttcgcggtgtatgcgcatcgctatatgagccccttcttcggctatctgaccgcgtggtcctactggtttatgtggatggcggtggggatctcggagattaccgccatcggggtctatgtgcagttctggttcccggagatggcgcagtggatcccggcgttaattgccgtgggactggtggcgctggcgaaccttgcggcggtccggctatatggtgaaatcgagttctggttcgccatgataaaagtgaccaccattatcgtgatgatcgtcgtgggtctgggcgtcattttcttcggctttggcaacggcggccactccatcggttttggtaatctcaccgaacatggtggtttctttgctggcggctggaagggcttcctgacggcgctgtgtatcgtggtcgcgtcctatcagggggtggagctcatcggcattaccgcaggtgaagcgaaaaacccgcaggtgacgctgcgcagcgcggtgggcaaagtgttgtggcggatcctgattttctacgtcggcgcgattttcgttatcgtcactatcttcccgtgggatcaaatcggctccaatggcagcccgttcgtactgacgtttgccaaaatcggtattaccgcggcggcgggaattatcaacttcgtggtgctgacggcagcgctttccggctgcaacagcggaatgtacagctgcggacgtatgctgtacgccctggcgaagaaccgtcagctgccggcggcgatcggtaaggtatcgcgcaacggcgttccgtccgtcggtgtggcgctgtcgattctgatcctgctggtgggctcctgcctgaattacattattcctaatccgcagcgggtgttcgtctatgtctatagcgccagcgtcctgccggggatggtgccctggtttgtgatcctgattagtcagctgcgtttccgtcgcgtgcatcaggcggcgattgccagccatccgttccgttcgctgctgtttccgtgggccaactatttcacgatggccttcctgatctgcgtgctggtcgggatgggactgaatgatgaaacccggatgtcgctcttcgtcggcattatttttctggccgccgtcaccctgatttataaggtgtttggcctcggaagacaggggcaagtcaataatacggctgaataaccgtcaaaacgaacaaagcatgagcaaacgataattttctttaaaaaggcactagacagcggggtaggaagtccgtattatccgaccccgcaacggcgctaagcgcccgtagctcagctggatagagcgctgccctccggaggcagaggtctcaggttcgaatcctgtcgggcgcaccattaacccggtgctggagctgcggtggttttaataccgcgtaaaaggtttgcagtggtggctatagctcagttggtagagccctggattgtgattccagttgtcgtgggttcgaatcccattagccaccccattatttgatagagttgtgaatttgcgaaggtggcggaattggtagacgcgctagcttcaggtgttagtgttcttacggacgtgggggttcaagtccccccctcgcaccacgactttaacgaattgaactaaaaattcaaaaagcagtatttcggcgagtagcgcagcttggtagcgcaactggtttgggaccagtgggtcggaggttcgaatcctctctcgccgaccaattttgaaccccgcttcggcggggttttttgttttctgctgccgtccgccatctcttatttctctgatcttgctgataaaaaatcttctctttgcttaagaatacgcgtcaggaaaactctcaattcatcactgtggtagatgcaatttccccggatcctgtgcgataataaccgggtagatgctcattccatctcttatgttcgccttcgtgcctcataaactccggaatgatgcagagccgttcttacggtgcttatcgtccactgacagatgtcgcatttatgcctcatcaaacaccatggacattacgttgagtgaagcacccaatttgttgtcaaacagacctgttttaacgcctgccctgatttcagcgcaggcgtttttttctttcagggatccgtcaatgcgaaggcgggggagaagggctatcgccccgcaggaggcgatagccatgccaggttatggctgaggattattctgcagcgtcagcagcagtccatctcggcgcatagcggcggcttcttccggctgatgcaggcggtccagggcatccgccagccaggcgtaatcaaaggcatccggacgctgcttaagcgcggcgcggaaggcgatgctggcctcctgccattcgccgtgccgcatcagcgactggcccagggtgctccacagcagcggacggtcgccaacggctttgatctgctggcgcagcactttctccagctgttccgggttattggtcttcagacgcgggatcggcatcaccagacggtcatcatactgtttcttcagaccatcaatgataatttgctgcgcggtatcgtgatcgtcgctctcgatgaggcgctcggccatcgctacctgcagcggcaccagcgcccgcgttttacggctctggttgcgccaccattcgcgtagtccttcgctgccgccatcggccagcgctttatccatcaggccaacccaggccagctgttccagcgccgcgcggtgcgcttcatcgccgacgttagctttcgccatcgacggaatgatgtccagcagcgactgccaggcgccggtgcgggtgtatgcctgttcggcgaggcgcagcacttccggatgacgcggggtaatttccagcagcttatcgatgccatggcgcgcagcgtgattttcattacgcgccagctgcaggcgaacgcgagtgatttccaccgggatcaggtcatcgcccgccagctcggtggcgcgctccagatgctggttggcccgcgcttcatcgccgcgctgctgggccgcttccgccgccagcagatagttcaccaccggctgttcggcgtgatcggcatttttcgccatcagcttctcaacctgctggtaatcaccttccgccagcttaagcagcgcctgctcggtttgcttacgcgcgcgacggcgtttacggccgacaaaccagccgcgcgtatgcgccccggtgcggaaaatgcggcgcagcagccattcaatggcgaacagcaccaccatggcgaggatcaggatgatcaccagcccggtcacgctggtctcgatattgtaattatcggtctggatcaggacgtagccctgatgcccggcgatcatcgggccgagcacgatcccggcgatcaacagtgcgaagagtaaaagaattttcagcatgcgttactctccttgcggcgcagcgggggcggccggcgcagcaggtgcgggcgaaggcgcgccgcccgcggtaacggcaggctgcgccatcaggttgcgcactcgggtctgcatcagtttttccagcaacgcctgactctgcagcgtttccggcaccgtcatggtaatgctttgctgactgagcttgtccacctcgtcgaggaaggctttggtggtggcgtcatcggtatcataataggcgcgtacccaggtcgagacgttatccagcgactgtttccaggtctcttcctgatggcgcggaactgcctgcgcggcgaccagcaggcgagagcgaatattttcccgcagatagatatcctgattcggcgccagcagcgggaccgccgtttcatcgcggcggcgcacggtgataaagctgtccataaagttctgccagcttttctgcaggttgacgcgccattcgctgatagagctggaaagctcatcgctatcagcgtccatcggcgaatcgtcatcgttattatcggccagccgcaggttatcgatttgattcgccagctgattaaccttgaggatcatgccgtcatagtccacctggcttaccgcggagagggtggcgatgtcgtcggtgatcgcccggcgggcgccgatgaggcttgggtcgttcatgtcggcgaggctggcgtcagcgcttttcagcagcgcggcggcggtggtgacatcctgatcgctccacagcttacgtcccgccagcttgacgaggaagtcggcctgggccagcagccaggttttggcatcgctaccggaaatcaccgccactttttgctgcagctcatccaactgtttggccagcgtctcctgctggtgtttggcttcgtttagctggtcggcctgctgtttgataacaccttccagttcacttttttgattttcctgcgctttttgcagcgccgcgacctggcttgctaattcagaggtagttgcgttttgccgcgtggcctgttgtttgttcaggccatacaggccgatgccggcggctatcgcaatggcgatagcgatcgcgctgagcgccaggctggttttattgcctgccttcttcttctcagtgttctctggctgtggtgtggtctccacggcctccctggtctcttcaaccacggcggattgattttgttgttccgtcattatggcttccaatgttgagagttattgtaatgcgcgtagcagcgcatcgttgtcggcgctatcggcaacctgaatctcctgccagcccagttcccgggcctgaagggccagacgttcgctgacaacgacaacgcggcagtgcaggagccactgttcgcgataccattgcggtattaacgaccatagctgctgcagcatctcgccgctggtgaccaccagcgtggtgactccgcgagattgccagcgcatcgcttcttctgcgccatcgtaatgttttgcactacgttgataacattcacaaaatgtgaccctggcgccgcgctcggtcagcgtcgcgcctaagagttcccgcccgccattgccgcgtaggatcagcgcatttttcccggcaatgttttgtaattcaggtaattgtagcaagacttcgctaatttcccgatctaacgggtaatggatatgctgcccactgaccgtatgcagggccagcgccgtcgtgcggccaatggcaaaatagcgcggagaagtgggccagggcaggccctgctgctgcagacgggcatgggcgaattccaccgcatgctgggatagcgcaaatagcagatcgtcgggccccagtcgggcaagcgcatcgcccagcgcgggaagctccctgccgggcgtaaattctatcagcggaaagctccaggccacgcgtcccatggcccgcagacggctgaccagcgcttctccttgcggtagtggacgagtgaccaggatgctcatcgcggggcttctccatcataaaccgccgcgagaatctcgcgggcgccattatccagaagctcttccgccagcgagatgccgagggcttccgcttgttccgctggcccgcgtcgttcgccgcgcaccagctgtgaaccatccggagcgccaaccagcgcccgcagccacagttccccgtccttcagttccgcatagctgccgatcggcacctggcagccgccttcgaggcgggtgttcatcgcccgctcggcgcgcacgcgcaccgccgtttccgtatggttgagaggcgctaacagcccccgggtccatgcatcatcaagacggcattcgatgccgaccgcgccctggccgaccgccggcagagattgctcaggcgacagcggctggcgaatacgcgcttccagctgcaggcgcttcaggccggcggcggcgaggatgatggcgtcgtactcgccgttatccagcttactcagccgggtaccgacgttaccgcgcagagagcggatcgccaggtccggacgggtggcggccagctggcactgacggcgtaaacttgacgtgccaacgacgctgccggccggcagttcgtcaatcgaggcatagcgattggagacaaacgcgtcgcgcggatcgtcgcgctcgcagatagtcaccagccccaggccctccgggaattcaaccggcacatctttcatcgaatggacggcgatatcggcgcgcccttcgagcatggcgagctctaactctttcacaaataagcctttgccccccacctttgccagcggagtatcaaggatgacatccccgcgcgtgaccatcggcaccagctcgaccttcagtccgggatgcgcttgttccaggcgcgctttaacatactgcgcctgccatagcgcaagcgggctttgccgtgtggcaattttcaaaactttgtctaacatgcttgttaccgtcattatcgaccactatccatcctaacattgttgtcttacggatgttagttttcacggtttatgtgggaggtggctccggcccactcttttttaacctttcatgcgcgtggcggttgccggaggcgtagtgaggaatttacaggtaataaacggtgctacacttgtatgtagcgcatctttctttacggtcaatgagcaaggtgttaaattgatcacgttttaaaccatttgtcagtccgctgctcatcacaaccacaccgacgacgaatggtgacggtttttgttgaaatactgaaatcctccgtactattgtacctcgggtttttgaacatcaggcgatatgtcttgtacctctatattgagacactgaaacagagactggatgccatcaaccaattgcgcgtggatcgcgcgcttgctgccatgggacccgctttccagcaggtttacagtctactgccaacgttattacattatcatcacccgctgatgccgggttaccttgacggtaacgttccccgtggcatttgcctctacacgcctgatgaaacccaacgccactatcttgaagaactggaactgcatcgcggtatgcagactcaggagccgccgaaaggcgagctgccgatcaccggcgtctactcgatgggcagtacttcctccgtcggccagagctgctcttccgatcttgatatctgggtatgtcaccaggcctggctggatagcgaagagcgtcagctgctgcagcgaaaatgcagcctgcttgagagctgggctgcctcgctcggcgtggaagtcagcttcttcctgatcgacgaaaaccgtttccgtcataacgaaagcggtagcctcggcggcgaagactgcggttcgacccagcatatcctgttgcttgatgagttctaccgcaccgcggtgcgcctcgccggcaagcgtattctgtggaatatggtgccgtgcgatgaagaggagcattacgatgattacgtgatggggctgtatgcccagggcgtgctgacgcctaacgaatggctcgatctcggcggcctcagttcgctgtcggcggaagagtacttcggcgccagcctatggcagctgtataaaagtatcgactcccctataaagcggtgctgaaaacgctgctgctggaagcctactcctgggaataccccaataaccgcctgttagcgaaagatatcaaacagcgtctgcacgacggggagattgtctccttcggcctcgacccgtactgcatgatgctggagcgcgtgaccacctatctgcaggccatcgaagatgaaacccgcctcgatctggtgcgccgctgcttctacctgaaagtttgtgaaaaactcagccgcgaacgcgcctgcgtcggctggcgtcgcgaagtcgtcagccagttggtgaatgcctggggctgggacgaaaagcgtctgatgatgctcgacaaccgcgccaactggaaaatcgatgaagtgcgcaaggcgcacaacgaactgctcgacgccatgatgcagagctatcgtaatctgatccgcttcgcgcggcgcaataaccttagcgtctccgccagcccgcaggatattggcgtgctgacccgtaagctgtatgcggcctttgaagcgctgccggggaaagtgacgctggtaaacccgcaaatttcgccggatctttcggaaccgaacctgacctttatccacgtgccgccgggccgcgccaaccgtaccggttggtatctgtacaaccgcgcgccggacatggaatcgatcatcagccatcagccgctggaatataaccgttatcttaataagctggtggcctgggcctggtttaacggcctgctgacctcacgcacccgcctgtttattaagggcaacggcatcgtcgatctggcgaagctgcaggagatggtggccgacgtgtcgcaccacttcccgctgcgcctgccggcgccgacgccaaaggcgctgtacagcccgtgcgaaatccgccacctggcgattatcgtcaacctcgaatatgacccaaccgcggccttccgcaaccaggtggtgcacttcgatttccgtaaactggatgttttcagcttcggcgaagagcaaaaatgcctgatcggcagcgtcgacctgctgtatcgcaactcgtggaacgaagtgcgtacgctgcactttaacggcgaacaggcgatgatcgaggcgctgaaaacgatcctcggcaaaatgcaccaggacgccgcgccgccggacagcgtggaggtgttctgctatagccagcacctgcgcggcctgatccgcacccgcgtgcagcagatgatctccgaatgtatcgaactgcgtctctccagtacccgccaggataccgggcgcttcaaagcgctgcgcgtctccggccagacgtgggggctgttcttcgagcggcttaacgtttcggtgcagaagctggaaaacgccattgagttctacggcgctatctcgcacaacaagctgcacgggctgtcggtgcaggtggaaaccaatcacgttaagctgccggcggtggtggatggcttcgccagcgaagggattattcagttcttctttgaagacgcggataacaacgacagcggttttaacatctatattcttgatgagagcaaccgcgccgaggtctatcatcactgcgagggcagtaaagaggagctggtgcgcgacgtcagccgcttctattcgtcatcgcacgatcgtttcacctacggctccagctttatcaacttcaacctgccgcagttctatcagattgtcgaggtagacgggcgcacccaggtgatccctttccgcactcaggcgattgccgccgcgatacccaccagccaggacgttaccgcctcgccggtgctgcagcagcgctactcgtagatttggcccggagaagacgtgagccgctatccgcagatattccctgctggcgctgcgcttagcagggctacggttctaagtcgtcgggtagcccggataaggcgcgatgcgccgctatccgggaaacacgtcattaacggaatttcaccgtctcaccggcctgctggctcgccgcctgctccagcagatcccagaaggtttcgccgctgcgatcgcagatccactcgtcgcctttgagatcgaagtgatagccgccctgtttggtggccagccacacctggtgcagcggctcctgacggttaataatgattttgctgccgttttcaaagctgatggtcagcacgccgccgttgatttcgcagtcgatgtcgctatcgccgtcccagtcgtccagacgttcttcgatggtcatccacaggctatcggccaggcgatggaattcactgtcgttcataatttgattctgcttttttgatttttgaagatgggtcgcagtatagcgcgaaacaaaagcgcgcgcagtcggatgctaaaggcttgcttttacgtcttctcctgcgatgatagaaagcagaaagaatgaatcacgggcaactatcaatgaaaaacgtttttcctacgcttgccgttttgtttgcgatcttcagcctgaccggctgcggtctgaaagggcctctctatttcccaccggcggacaaaaccgcgccgccgccgaccaaaccggttaaccctggcattcagagcgcaacgccggatcgtaacgatcgtggcgataccggtggtccgagccaggtcaattactaacgataacgttctgttccgcgcaactggagtagatgatgcagttctctaaaatgcatggccttggcaacgattttatggtcgttgacgcggtaacgcagaatgtttttttctcgccggagctgattcgccgcctggcggatcgccaccttggcgtcgggttcgatcagctattggtcgtcgaaccgccctacgatccggatctggatttccactaccggatctttaacgccgacggcagcgaagtgtcgcagtgcggcaacggcgcgcgctgttttgcccgcttcgtccggctgaaaggcctgaccaataaacgtgatatccgcgtgagtacggccaacgggcgtatggtattaagcgtaacggaagacgatctggtgcgggtgaacatgggcgagcccaacttcgagccgtcccaggtgccgttccgcgccaacaaagcggaaaagacctatatcatgcgtgccgccgagcagacagtattgtgcggcgtggtgtccatgggaaatccgcactgcgtcatccaggttgatgatgtggatacggcagcggtggaaactctcggcccggtgatggaaagccatgagcgttttccggagcgcgccaatatcggctttatgcaggtggtcggtcggtctcatatccgtctgcgcgtctacgaacgcggcgcgggggaaacccaggcctgcggcagcggcgcctgcgccgcggtggcggtggggatccagcaggggctgctggcggaaacggtacgcgtggaattacccggcggtcgtcttgatatcgcctggaaaggcccgggccagccgctgtttatgaccggcccggcggcccatgtctatgatggatttattcatttatgaaaccaatcggggaagaacagcaggaggttgccagcgcgttgaacgatcgcgcagtggtggactatctgttgcaacatcctgaattttttattcgtaatgccgcccaggtcgaacatctccgcgtcccgcatccggtacgcggtacgatttcgctggtggagtggcacatgatgcgggcgcgtaaccatattcatgtgctggaagaaaatatgtcgctgctgatggagcaggcggtcgctaatgaaagcctgttccagcgcctgctgcagctgcaaacgcggctggcggcggcggagagccttgacgatatgctcaaccgccttcaccgctgggcacgcgagctggggctggcgggcgccacggtgcgcctgtttcctgactgctggcgcctcggcgcgccctcgaagtttacccatctggcattaaaccggcaggcgtttgagccgatccgtattcaacgtctgggccaggcgcgccactatcttggaccgctgaacggcccggagctgctggtggtgctgccggaggcgaaggccattgggtctgtggcgatatcgctgctggggggcgataatgccccgggggtgatgctcttcagcagccgcgatgcgcagcattatcagccagggcaggggacgcagctgttgcaggagattgcccagatgctgcccggcctgctggagcgctggattgaacgcgcatgaccgattctcctctcttctccgccgtcgcccgctttcttcgccatcttggcgttgaacgccagctcagcccgatcacgttactgaattaccagcgacagctggacgcgctgatcgccctggcggatgaggcgggcctgaaaagctggtcgcagtgcgatgccgctcaggtgcgaagctttgcggtgcgtagtcgccgcgcggggttaggcccggcaagcctggcgcttcgcctgtcggcgctgcgcagtttcttcgactggctggtcggtcagggcgagctcagcgccaatccggcgaaggggattgccgcgccgaaaattccccgccacctgccaaaaaatattgacgtcgatgacgtcaatcgactgctggatatcgatctcaacgatccgctggcggtgcgcgatcgggcgatgctggaggtgatgtacggcgcgggattgcgtttgtccgaactggtcaacctggatatcaaacacctcgatctcgaaagcggtgaggtctgggtgatgggcaaaggcagcaaggagcgtcgtttgccgatcggtcgcaacgcggtggcatggattgagcactggctggatttgcgcggcctgttcggtaccgacgacgacgcgctgtttttgtcgaagctgggcaaacgtatttcggcgcgcaacgtacagaagcgattcgccgagtggggcattaagcaggggctgaacagccatgtgcacccgcacaagctgcgccactcctttgccacccatatgctggagtcgagcggcgatctgcgcggcgtgcaggagctgctggggcatgctaacctctccaccacccaaatctatacccatcttgattttcaacaccttgcctcggtgtacgatgccgcgcatccgcgcgctaaacgggggaaataatgcgtttttaccgacctctgggccagatttccgcgctgacgtttgacctggacgataccctttacgataaccgcccggtgattgaccggacgatgcacgagtcgctggcctttgtgcgcagctaccatccttcgctcagccagttcgacgcccatgagcttaatcagctgcgtcagacgctgctggctgctgaacctgagatttatcatgacgtgaccgtctggcgccaccgtgcgctggagttaggtatgcgtaatgccgggctctccgccgaagcggcgaaagcgggggccgatgcggcgatggaacacttcgctcactggcgcagccgcgtcgatgtcccgcaggaaacgcacgatacgctggcgaagctggcgaagaagtggccgctggtggcgattaccaatggcaacgcccgcccggaactgttcggtctgagcgactatttccgcttcgtgctgcgcgccgggccggatggccgctccaagccgtttgccgacatgtaccaccttgcggcggagcgtctgaatgtgccgctcgggcagattctgcacgtcggcgatgatctgaccaccgacgtggccggcgctattcgctgtgggatgcaggcctgctggatcaaaccgcaaggcgcggacctgatgcacaccgcggacagccgcctgctgccgcatattgaaatttcacggttggcatctctgacctcgctgatataatcaccagtcactctgtatatattaacaggggttcgtggaaccccttctcttccggcggtgccaatggacgtttcttacctgctcgacagccttaatgacaaacagcgtgaagccgtagcggcctcgcgcaccaatatgctggttctggcaggggcgggcagtggtaagacgcgcgttctggtgcaccgtatcgcctggctgctgagcgtggagaactgttccccgtattccattatggcggtgacctttaccaacaaagcggcggcggagatgcgtcaccgtatcggccagttgatgggcaccacccagggcggcatgtgggtgggcaccttccacggcctggcgcaccgtttgctgcgcgcgcaccatctggatgccaacctgccgcaggacttccaaatccttgacagcgaagaccagctgcgtctgctgaagcgtctgattaaggcgatgaacctcgatgagaaacagtggccgccgcgccaggcgatgtggtacatcaacagccagaaagatgaagggctgcgcccgcatcatattcagagctacggcaacccggtcgagcagacctggcagaaggtctatcaggcctatcaggaagcctgcgaccgcgccgggctggtggacttcgccgagctgctgctgcgcgcccatgagctgtggctgaacaaaccgcatatcctgcagcactaccgcgagcgcttcaccaatatccttgtcgatgaattccaggataccaacaacattcagtacgcctggatccgcctgctggcgggcgataccggcaaggtgatgatcgtcggcgatgacgatcagtctatctatggctggcgcggcgcgcaggtcgagaacattcagcgcttccttaacgacttccccggcgcggaaaccatccgcctggagcagaactatcgctcgaccagcaatattctcagcgctgccaacgccctgattgaaaacaacaacgggcgcctgggcaaaaagctgtggaccgacggcgccgacggcgagccgatttcgctgtactgcgccttcaacgatctcgacgaagcgcgctttgtggtgaaccgaattaaaacctggcaggagaacggcggcgcgctggagcaatgcgccattctctatcgcagtaacgcccagtcgcgcgtgctggaagaggccctcctgcaggccagcatgccgtaccgtatctacggcggcatgcgcttcttcgagcgtcaggaaatcaaagacgcgctctcttacctgcgccttatcgccaaccgcaacgacgacgcggcgttcgagcgagtggttaatacgccgacccgcggcattggcgaccgcacgctggacgtggtgcgccagacgtcgcgcgatcgccagctgacgctgtggcaggccagtcgtgagctattgaaagaaaaagcgctggccggtcgcgccgccagcgccctgcagcgctttatggagctgattgacgcgctggcgcaggagaccaccgatatgccgctgcacgttcagaccgatcgggtgattaaagactccggcctgcgcgcgatgtacgagcaggagaaaggcgagaagggccagacccgtattgaaaacttagaggagctggtgacggcgacgcgccagttcagctacaacgaagaagatgaagatctgatgccgctgcaggcgttcctctcccacgccgcgctggaagcgggcgaggggcaggcggacacctggcaggacgcggttcagctgatgaccctgcactcggcgaaagggctggagttcccgcaggtgttcatcgtcggcgtcgaagaagggatgttcccgagccagatggcccttgatgaaggcggccgcctggaggaggagcgtcgcctggcctacgtcggcgtaacgcgcgccatgcagaagctgacgctgacctatgcggaaacccgccgtctgtacgggaaagaggtttatcaccgcccgtcgcgctttatcggcgagctgccgcaggagtgcgtagaagaagtgcgtctgcgagccacggtgagccgcccggtaaaccatcagcgactgggcgcgccgattgccgagagcgataccggctacaagttaggccagcgcgtacggcatccgaagtttggcgaaggcactattgtcaacctcgaaggcagcggcgagcacagccgactgcaggtggcttttcagggccagggaatcaaatggctggtggcggcttacgcccggctggaggcagtgtaactttaagaaaaatatcattattttgtaatattctgctacctttatacgttaaggcgcctgatttgcgctttcgcgttccgttgcgtgttgacgccgattttgcgctggcgtaacatgcgcgcacgattacgctaagaggacattcgccttggacacacccagtagatgctggctcaacttcctgtcattcaggaacaactcctaaggctatcctcttatgctgatagccttagcggttgtcagcgacctgccccattcccgtcgcgctgagtcaggcttaatggtctgaaacccaatttgtttctgtgtgcccaccgaactgtccgataatttttttgcattgggagtcccggtcatgctgagcgcatttcaactggaaaacaatcgtttaacgcgcctggaagccgatgagatcaaacacctcgccagctcggtgtgggtcgatctggtcgagcctgacgacgatgagcgaagccgcgtgcagacggaactgggtcaaaacctggcgacgcgcccggaactggaagatatcgaagcctccgcgcgtttctttgaagatgaagacgggttacacatccactcgttcttcttttttgaagatgccgacgatcacgccggcaactctaccgtggcgtttaccatccgcgaaggccgcctgttcacgctgcgcgagcgcgaactacccgctttccgcctctaccgtatgcgcgtgcgtaaccagacgctggtcgacggcaacgcctacgaactgctgctcgacctgttcgagaccaaaatcgagcagctggcggatgaaattgaaaacatctacagcgacctggaaaagctgagccgcgtcattatggaaggccatcagggcgacgagtacgacgaagcgctgtcgacgctggcggaactggaagatatcggctggaaggtgcgcctctgtctgatggatacccagcgcgcgctgaacttcctcgtgcgcaaggcgcgcctgccggcgggccagctggagcaggcgcgggagatcctgcgcgatatcgaatctctgctgccgcacaacgaatcgctgttccagaaggtgaacttcctgatgcaggcggcgatgggttttatcaatatcgagcagaaccgcattatcaagatcttctcggtggtctcggtggtattcctgccgccaactctggtggcctccagctacgggatgaactttgaatttatgccggagctgcattggagctttggttatccgggagccatcgtgtttatgatgttggccggcctggcgccatatctctacttcaagcgtaaaaactggctgtaaaaaaagggagcgtcggctcccttctttactggctgatgcaggcttagcctctgcgcaaccggcgttgggtatacagcgcatcgacgataaacaccgccagcgcgacccagataaagccaaaggtcaccattttatccttgcccggcacttcgccgtagaatgtcaccgccagcaggaacatcagcgttggaccgatgtactggaaaaagcccagcgtggagagccgcagacgcgttgccgccccggtaaagcacagcaaagggatggtggtcaccacgcccgcggccatcagcagcagattgagcgaccaggggttctcgcccatatggctggtcgggctgtcggtgatgccgaacaaccagattgccgccaccggcagcagccacagcgtttccaccagcatgccggtttgcgcatcgacagcaattttctttcgcaccaggccgtaaaaggcaaaactgaaagccagcccaagaccgattatcggcagcgaaccaaaggtccacagctggaccagcacgccgcaaaaggcgaggatcaccgccagccactgcagacgacgaaagcgttcgccgaggaaaatcatccccaacaaaatattcaccagcgggttgataaagtagccgaggctggcttccagcatatggtggttattcaccgcccagatgaacaacagccagttaccgccgaccagcactgccgagagcgccagcaggaagatcttgcgcggcgttttcagcagctttttcacctgtggccactggcggctgacgctgatgagcgccaccatgaagaagaaagaccagatcacgcgatgggtcaaaatttcatcggcgggaacatagtagataagtttgaagtacgctggcgcgataccccagataaagtaggcggcgagggccagaatgatccccaaccgcgtctgtttcgcatccatcggtaaaatccattgccaaagagagtgatgttactcgattttggccaatcaacccaccatataggtggccgttgcgctggcaatatagacctgagcttcgttatgcagttccacgcgggcaaccgccactttattgccggcgcgcagcagggtgctggtggcggtaaaacgttcgccgcggcccggacgcaggtagtccacgcgcaggtcgatggttcccatacgggaaagccgttggcgcaactcttcttcgttgatggtgtcatggcgggtaagggtactgccgacgcagaccaggccagcggcaacgtccagcgcggaggcgatcaccccgccatgcagaatgctttgcgcccagttgccgaccatcatcggctgattattaaagctaagctgggcaaacgctttttcgtagcgttccagttcgagaccgagggcgcggttaaacggcatgtgatagacgaaaatctcccctaccagtttcagggctgcttcggcagtaagttcagacataacaccggttccattcgttaataaaatgttgattttatgcttctaaaatattgatttccactttcggagcggattagggggcaggtgattaataaacaggtagaatggcttcaggttaaacaaaaataaaaactatttttcaggagaccagcatgcgtatctctttggcctgcctggtggcgctgtgcgcgctaccggccggtgttatggcgcaggacgcgtcggtacacgacaaaccggcagtgcgcggcagcattatcgccaacctgctccaggaccatgataatcctttcctgctctacccttatgagagcaactatctgctctatacgtggaccagcgacctcaataaagaggcgatccgcagctatgactgggccgaaaatgcccgtaaagatgaagtgaagtttcagctaagcctggcgttcccgctgtggcgcggtatcctgggcgataattcgctgctgggcgcgtcctatacccagaaatcctggtggcagctctctaacagcaaagagtcggcgccgtttcgcgaaaccaattatgaaccccagctgtttttgggctttgcgaccgactaccagtttgccggctggacgctgcgcgatatcgagatggggtataaccacgactcgaatgggcgttccgaccccacctcgcgcagctggaatcggctttatgcccgcctgatggcgcaaaacggtaactggctggtggaagtgaagccctggtatgtggtgggcaacaccgatgataacccggatatcaccaaatatatgggctattaccggctgaaggtgggctaccagctgggagaggcgatcctcagcgcgcaggggcaatacaactggaacaccggctacggcggggcggaacttggcgtgagctatcccattaccaaacatgttcgcgcctatacgcagatctacagcggctatggcgagtcgcttatcgactataactttaaccaaacgcgcgtcggcgtcgggctaatgctcaacgatctgttttaatcgttgcactctggctcgcaggcgctgaaaatagcgcctgttttcttttcaggcaaatggggtcaacgtggcacaggcggaagtattaaatcaggaatcgctggctaagcaggttttacaagagaccttcggctaccagcagttccgtcctggccaggaaacgattatcgagacggcgctcgaaggccgggactgcctggtggtcatgccgaccggtggcggcaagtcgctgtgctatcaggtgccggcgctggtcatgggcggtctgacggtcgtggtctcaccgctgatctcgctgatgaaggaccaggtcgatcagctgctggccaacggcgtggcggcggcttgtctgaactcgacgcaaagccgcgagcagcagcaggaggtgatggccggctgccgcagcgggcaggttcgtctgctgtatatcgcgccggaacggctgatgctggataactttcttgagcatctggcgaactggaatctggcgatgctggcggtagacgaagcgcactgtatctcgcagtggggccatgacttccgtccggaatatgccgcgctgggccagctgcgtcagcggatgccgcagatcccgtttatggcgttgaccgccaccgccgatgacaccacccgccgcgatatcgtccgcctgctggggcttaacgatccgctgattcaggtcagtagcttcgaccggccaaacatccgctatatgctgatggagaaatttaagccgctcgatcagctgatgcgctacgttcaggatcagcgcggcaaatcgggcattatctactgcaacagccgttcgaaagtggaagacaccgccgccaggctgcaaagccgcggtattagcgcggcggcttaccatgccggtctggaaaacgacgtgcgcgccgaggtgcaggagaaattccagcgcgacgatctgcagatcgtggtggcgacggtggccttcgggatgggcattaacaagccgaacgtccgctttgtggtgcattttgatattccgcgcaatattgaatcctactatcaggagaccggccgcgccgggcgtgatggcctgccggcggaagcgatgctgttttacgatccggcggatatggcgtggctgcgccgctgtctggaagaaaaacccgccgggccgctacaggatatcgaacggcataagctgaatgcgatgggggcgtttgccgaagcgcagacctgtcgccgtctggtgctgctgaactattttggcgaagggcgtcaggagccgtgcggcaactgcgatatctgtcttgacccgccaaagcagtacgatggcttaatggacgcccgcaaggcgctttcaacgatttaccgggtcaatcaacgcttcggaatgggttacgtggtggaggtcctgcgcggggccaacaaccagcgcatccgagagatgggccacgataagctgccggtttacggtatcggccgggagcaaagtcacgagcactgggtgagcgtgatccgccagctgatccaccttgggctggtgacgcagaatatcgcccagcactccgcgctgcagctgaccgaagccgcgcgaccggtgctgcgtggcgaagtgccgctgcagctcgccgtgccgcgtatcgtggcgctgaagccaaaggcgatgcagaaatcctttggcggcaattacgaccgtaaactgttcgccaagctgcgcaaattacgtaaagcgatcgccgacgaagagaacatcccgccatatgtggtcttcaacgacgcgacgcttatcgagatggccgaacaatcgccgctgaccgccggcgaaatgctcagcgtcaacggcgtggggacacgcaagctcgagcgtttcgggaagccgtttatggcgctgattcgggcgcatgttgatggcgacgatgagtagtcagctggctgaaaaagtgccagaatagtttctctcttcattattttcctgcgagttaactatgctgatgcttttcctcaccgtggcgctggtgcatatcattgcgctgatgagcccggggccggactttttctttgtctcacaaacggccatcagccgctcgcgcagagaggcgatgatgggtgtgctggggatcacctgcggcgtcatggtctgggcgggagtggcgctgctcggcctgaacctgatcctcgcccggatggcgtggctgcataacattataatggtcggcgggggcctgtatctatgctggatgggctaccagatgctgcgtggcgcgctgaaaaaagagaaggtggcctcggcggagccgcaggtggagctggcccgcagcggacgcagcttcgtgaagggattgctgaccaatctggcgaatccgaaagcgattatctacttcggctcggtgttttcgctgttcgtgggtgacagcgtcggcgccggcgcgcgctggggcattttcctgctgattatcgttgagacgctggcctggtttatggtggttgccagcctgttcgccctgcccgggatgcgccgcggctatcagcggatggcgaagtggatcgacggtatcgccggtacgctgtttgcgggcttcggcatccacctgattatctcgcgttaaccggcatgctgtttcccacccggttgtttccgggtgggaaagtatcagtggcgaagccgctgcagctcgtcttcagacagaccggtcatttccataatcgcctggtcatcaataccgcgactgcgcatcgcttcggcaacctgcaccagagcctggtgtttaccttcttttatgccctgctgtacgcctttctccataccttctgcaagccatgtttccgccagcgtcatcagtaatcctccatgctgcggcacgcgctgtgccagcccgtacaagagtgtccgagtatcttcggcatcccctgcctgagccatatagtttaccaatacggtgatttgttgtccgctcatctgctccagcattaagaggtgggtcaacttatccagcaattgcgccatatcgcgctggcggatgtgcttttgcaccagcgtcagggctgccatgctgcggtgctgcatgatgtcgtcgtcggggatcaccgtgatatcgaccagcggaaacgccccgctatagagctggctggcggtctcaggatcggcaaaattatccagccagcgcatcgaccagggataggggctgcgtcgtccctgatagaagagaatagggataaccagaggcagcgttttatggccgctctccaggtgccgctgcatggcggcgatggcatagcgcattaagcgaaaggccatcagcttatcgggtgcgctctggtgctcgatcagaacatggacatagcccgcaccgcgggtggtttccagcgaatataggatatcgctgtagtaaggcctgagatcgtcttcaagaaagctgccggattccagacgcagggtgtccagtttgcagatctgtgttaacgacggaggcaggtggagctcgataaaatcgcgcgccgtctctacccgtgagagaaaagttttaaataccgcatcatgaggggtcgccgtttccgccattgccgttcatccatgaatcacgtatctggcggcatcctggcacggcgggttcagcgccgacagcgggcaataaaattaattacccactttgcgcgccggctcgcgcagagagaaagcgtcgttcacctcgcgaacctctctttgcgagcgagattccatgattcaggcatggcgggcggaggcgagcagcgccccgaccagcataaacagtgaaccaaagactttgttcaacgccttcatctgctttggccctttgatccatgcggaaatgcgctgcgccagggtcgcatagccaatcatcacaatgatatcgacgacgatggtggtgacgcccagaacgagatattgcatcacctgcggctggtgcggcaggataaactgcggaaaaagggcggccagaaaaacaatgcttttgggattggtgagatttacgaacaccgcgcgctggaacagtttgccgcgcgtctgcgccttcgccagcgtattcaggtcgatcgcccctgccgcccgccattgctggatacccagccagatcaggtaggcggcgccggcccattttagcacctcaaaggccagcaccgagcgggagaagagagtgccgagaccaacgccaaccagcacgatatgaatggccagcccggtctgcaaaccggcaatcgacgccgccgcgccgcggtatccgtggttaatggaagtggtcatggtattaatcgctccggaacccggcgacaggctgagaataattgatgtcagcaggtaggcgaaccaccactcaatggtcatgagaaactccctgattgtctgtttttatgccacaatacgctattgtgtcagcattgtgtgatacacggtaaaaaaacgattttcagcggttaacaggggtgtaaacccgatgtttgggcagaaaaaggactgggaaacacgagaaaacgcgtttgcggcctttagcatggggccgctgacggatttctggcgacagcgcgaagaagctgaatttaaaggcgtcgacgatgtaccggtacgctttgtccgcttttgcgcgcaacataacgatcgtctggtgttgatttgccccgggcgcattgaaagctacgtgaagtatgctgaagtggcctacgatctctttcactgcggctttgacgtgatgatcattgaccatcgcgggcagggacgctcgggccgcctgctctcagatacccaccgcggacacgtggttaacttcagcgactatgttgatgacctggccgcgctctggcagcagcaggtggttcctggacactggcgaaaacggtttatccttgctcattctatgggcggagcgattgccacgctttttctgcaacgttaccgggcgcattgcgatgcaatagcgctctgcgcgccgatgttcgggattatcattcggctgccggactggatggtgcgccatattctcgactgggctgagggccatcagcgcattcgcgaagagtatgccatcggcaccgggcgctggcgggcgctgccttttgccgttaacgtgctgacgcacagtcggcaacgctatcgtcgcaacctgcgcttctatgccgatgagccgcggctgcaggtcggcggtccgacctggcactgggtgcgtgagggcatgctggccggcgacgaagtgctggcgaatgtggaaaaagataccgccccgacgctgcttttacaggcggaggaggagcgggtggtcgataatctgatgcacgaccgctattgcgaattacgggccgctgccggccatccttgtgagggcggtaaaccgctcgtcattgaaggggcatatcatgagatcctttttgaaaaggacgctatgcgctcagtcgcgctcaatgccatcgtcgagtttttcaatcgacatacttaatccgacgataacgctcgtcgccctgcttagaggttaacttttttatgtaccaggttgttgcgtctgatttagacggcacgctgctttcccccgatcatttcctgaccccgtatgccaaagagacgctaaagctgcttaccgcccgtgggatcaatttcgtcttcgccaccggccgtcactacatcgacgtcgggcaaatccgcgataatctcggcatccggtcgtacatgatcacctctaacggcgcccgcgttcacgatagcgatggtcagcaaatctttgcccataacctcgatcgcgatattgccgccgacctgtttgagatcgtgcgtaacgacccgaaaatcgtcactaacgtttatcgggaagacgagtggtatatgaaccgccatcgtccggaagagatgcgcttcttcaaggaggcggtgtttaactacaagctgtatgagccgggcgaactggatccgcaggggatcagcaaagtattctttacctgcgaggatcatgagcatctgctgccgctggagcaggcgatgaacgcccgctggggcgatcgggtgaacgtcagcttctccaccttaacctgcctggaagttatggcgggtggggtatcgaaggggcatgcgctggaggcggtggcgaagatgctcggctacactctttccgattgcatcgccttcggcgacggtatgaacgacgctgagatgctgtcgatggctggcaaaggctgcatcatggccaacgcccaccagcggctgaaggatctgcatccggaactggaagtgatcggcagtaacgccgacgatgctgtcccgcactacctgcgtaagctatacctcgactgaaaaagattgacgactggcgaataagtgtccagtcgtcaacctgactcttcgctacaatgcctgttctttatccaacgagacgaccattgtggcgctgttaattatcaccactatcctgtgggccttttcttttagcctgattggcgaatacctggccggtagcgtcgacagctatttttcggtgctgatgcgcgtgggcctggcggcgctggtgttcctgcctttcctgcgcacgcgcggccagtcgccgcgcacgatcgtgctctatatgctggtgggcgcgatgcagctaggcatcatgtacctgctggctttccgcgcctatctctatctgacggtctcggaatttctgctgtttaccgtgtttactcccctgtatatcacactgatctacgacctgctcagcggacgtaagctgcgctggggctatctgctgagtgccgcgctggcggtgctgggggcggcgattatccgctatgacaaagtcagcgatcatttctggaccgggctgttactggtacagctgtcaaacctctgcttcgccatcggtatggtggggtataagcgtctgatggaggtgcgtccgatgccgcagcacaatgcctttgcctggttctatgtcggggcctttatcgtggcggtggcggcgtggtttatgctcggcaacgcccagaagctgccgaccaccacgctgcagtggagcgtgctggtgtggctcggcgtggtggcttccgggctgggttactttatgtggaactatggcgccacccaggtggatgccggcacgctggggatcatgaataacgtccatgtccccgccgggctgctggttaaccttgccatctggcaggagcagccgcactggccgagctttattagcggagcgttggtgatcctggcctcgctgtgggtccatcgccgctgggtcgctccgcactccggacaaacggcagatgatcgcaggcgtggttccgcgcagagcgaataaacgcttcggtgaccggttgacgctgttcgccatcgcgaacggccgcgtacaaccggctccataatccctcacccagggttttggtgaccaccaggccctggcgttcaaagctttccaccacccagtgcggcagcgcggcgatgcccatccgggcagccaccatctggatcaacaacagcgtgttatcgacgcttttcagctgcgggctgatgccggccggctgcaggaagtggcgccagatatcgaggcgcccgcgctgcacgggataaatcaacagcgtttccgcggccagatcctccggggtaaccagcgtcttcatagctaacggatgctcgggcgccagcaccagacgcacctcaaaatcaaacatcggcgagtagtgcaggccgctgcgcggcagaatatcggaggtcatcaccagatccagttcaccctgctgcagcgcaggctgtgggtcgaaggtgacgccggaatggaagtcgacctccacatgtggccagcgggcgcggaaattctccagcgccggcgtcagccactgaatacagctgtgacattcgatagccagcctcagccgggtctgctgtggttcgttacagtcctgcagggcgcgagcgatctgcggcagcacctggttggccagctgtaagaggatttccccctgaggcgtaaaacgcagcggctggctcttacgcacaaagagacgaaagccaaggcgctgttccagatcgctgaactggtgagacaaggcggactgggtctggtgcagggccgctgccgcacccgccagtgaaccgctgttccgcaacgcttgcagcgttttcagatgtttaatttcgatcatgaaagtccttcacttcgccatgagcaatttgcgcttgaggaatatacagtaactgtcaattatggatgtgtaaacatctggacgtctaaaactcgtcatatttcgacttgcagatgcgttggctgccttgcttaccccagtcacttccttcagtaagctcctggggatgcgcatcgttgccgccttcctgcaagccgaactattgagattttttcttcagattcaatgaaataagagaggaacataaatgacaattattaaccacaccctcggttttcctcgcgttggcctgcgccgcgagctgaaaaaagcgcaagagagctactgggcgggcaacgccactcgcgaggaactgctggcggtaggccgtgagctgcgcgcccgtcactgggagcagcagaaacaggcgggcgttgatctgctgccggtgggggatttcgcctggtacgaccatgttctgactaccagcctgctgcttggcaacgtgccggctcgtcatcagaacaaagacggatccatcgacatcgataccctgttccgcattggccgcggccgcgcgccgactggcgaaccggccgccgctgcggaaatgaccaaatggttcaacaccaactatcactatatggtgccggagttcgtgaagggccagcagttcaaactgagctggacccaactgctggatgaagtagacgaagcgctggcgctgggccacaagatcaagcccgtgctgctggggccggtaacctatctgtggctgggtaaagtgaaaggtgaaccgtttgaccgcctgaccctgctgaataccatcctgccggtttaccagcaggtgctggccgaactggcgaagcgcggcatcgattgggtgcagattgatgaaccggcgctggtgctggagctgccgccagcgtggctggaggcctttcaaccggcttatgacgccctgcagggccaggtgaagctgctgctgactacctattttgaaggcgttagcgacaatctcgcgaccattgctgcgctaccggtccaggggctgcacgtcgatctggtgcacggcaaagatgatgttgccgaactgcacaaccgcctgccggccgactggctgctgtccgcgggcttgatcaatgggcgtaacgtctggcgcgccgatctcaccgaaaagtatgcgcaaattaaagacctcgtcggtaagcgcgagctatgggtcgcgtcatcctgctctctgctgcatagcccgatcgatctaagcgtggagacgcgccttgatgcggaagtgaagagctggtttgccttcgcgctgcagaaatgcggtgagctggcgctgctgcgcgatgcgctgaacagcggcgatacagcggcgattaccgagtggagcgcgccaatccaggcccgtcgccattcgacccgcgtgcacaacgcggaggtggaaaaacggctggcggcgatcactgctcaggacagccagcgcgccagcccctatgaggttcgcgcgcaggcacagcgccagcgctttaacctgccgaaatggccgaccaccaccatcgggtcattcccgcaaacgaccgagatccgcggcctgcgcctggacttcaaaaagggtaaccttgacgccagtcattatcggacggggattgcggaacatattaagcaggcgatcgtcgagcaggagcggttaggtttagacgtactggtgcacggggaggccgagcggaacgacatggtggaatacttcggcgaacatctggacggttttatcttcacgcaaaacggctgggtgcagagctatggttcccgctgcgtgaagccgccggtggtgatcggcgacgtcagccgtccgcaggcgatcaccgtcgactgggcgaagtatgcgcagtcgctgaccgacaagccggtgaaagggatgctcactggaccggtgaccattctgtgctggtccttcccgcgggaggatgtcagccgtgaaaccatcgcgaaacagattgcgctggccctgcgtgatgaagtggcggatctggaggcggcggggatcggcatcatccagattgatgagccggcgctgcgcgaagggttaccgctgaagcgcagcgactgggatgcctatctgcagtggggtgtggaagccttccgccttaatgctgcggtcgccaaagacgacacgcagatccatactcacatgtgctattgcgagttcaatgacatcatggactccattgccgcgctggacgctgacgtgatcaccattgaaacctcgcggtccgatatggagctgctggagtcgttcgaagcgttcgagtaccccaatgagatcgggccgggagtatatgatattcactcgccaaacgtgccgagcgtggagtggatcgaagcgctgctgaagaaagctgcgcagcgtatcccggtggagcgactgtgggttaacccggactgcggcctgaaaactcgcggctggccggaaacccgcgccgcgctggcgaatatggtgcaagcggcgcgaaatctgcgccagtccgcctaatcgttacgcgaaaaatcaaaaaggaggcatttgcctccttttttcatgcttagggcgattacccttttttaccgccatactgagcaaaccaggcgagcatccgctgccagccgtctttggctgactcttcatgatagctggcgcgatagtcggcgttaaaggcatgatcggcttcgggatagaccacgatttccgccgtggcgttggctgcccgcagcgcctgacgcatagtctcgacggtgtcctgcggaatgctggcgtctttagcgccgtacagaccaagcaccggggcgttgagatcgacggcgatatctaccgggtgcttcggcgaattcagtgatttttctcccaccagcttaccgtaccaggccactgccgctttaagctgcgggttatgcgcggcatacagccaggtaatgcgtccgccccagcagaagccggtgatcagcagacgatgggcatcgccgccgtggcgcgccgcccagctggcgacgtggtcgagatccgccagcacctgcgcgtccggcaccttgctgaccagctctttgaacagggtcgggatatcgtggtactcattcggatcgccctgacggaagtacaattcaggcgcgatagccagatagccttcctgtgccaggcggcgacaaagatcgcgaatatgttcatgcacgccgaaaatttcctgtaccacgataacgatcggcagcggaccgtcggcatttttcgggcgggcgtggtaggccggcatgttttcaccctgagagggaatcgacgtctctccggcgataatatgctcttccggcgtatgaacggcggttgcggcgtgtggtgaagctgcaggtgcgaatccaggttgcttggtggtggtcatggtattctccgtacccttatttattagcgcatcagtaactatagaccctttacctttagttcgggcggtaataaagcacagtgcctgaaagcggctatcttttgttctgtgatgatgaatataacttgttaatgtgatgtgtatcactatttactgaaaaacaactgcaactattattggtcttggtgactatcatcacaaaatgttgccaggggcttctgtacagtaccgttttgcttctgctgataattcgacccacagaggagttttttatgtccaagtctgatgtttttcatctcggcctcaccaagaacgatttacaaggggctacgctggctatcgtccctggcgatccggagcgtgtggaaaagatcgccgcgctgatggataagccggttaaactggcatctcaccgcgaatttacctcctggcgcgcggagctggacggcaaaccagtgatcgtctgctctaccggcatcggcggcccgtcgacttccatcgccgtggaagagctggcgcagctgggggtgcgtaccttcctgcgtatcggcaccacaggtgcgattcaaccgcacatcaacgttggcgatgtgttggtgactaccgcctccgttcgtctggacggcgccagcctgcacttcgcgccgatggaattcccggccgtcgcagacttcgcctgcaccaccgcgctggtggaagcggcgaaatcaatcggcgccaccacccatatcggcgtaaccgcttcctcggataccttctacccgggccaggagcgttacgacaccttctccggccgcgtcgtgagccgcttcaagggctcaatggaagagtggcaggcaatgggcgtgatgaactatgaaatggaatccgccacgctgctgaccatgtgcgccagccagggcctgcgcgccgggatggtggctggggttatcgtgaaccgtacccagcaagagatccctaacgccgaaaccatgaagcaaaccgaaagccacgcggtgaaaatcgtcgtggaagcggcgcgtcgtctgctgtaactcaacactttccctgtcaggccggatcctccggcctttcttttttgcgtcgcctctcgcaggaaattccttttaaactggacgtttgtacagcacaattctattttgtgtcatcaggttatcgcagggggcgtcgtggatctctccattattatcagcgcggttatcgcactggcagccgggttaatggtcggctggctggcgaccaaagcgcgcgccgatcaaattcgggccgatctcatcgaggaacggcgagagttggatattgagctgagcgccgcccgccagcaactggcgcaggaggcccactggcgtgaggagtgtgagctgctgaacaacgagctgcgcagcctacgggatatcaatacctcgctcgaggccgatctccgtgaggtcaccacccggctcgaatccacccagctgcatgcggaagataagatccgccagatgatgaacagcgagcagcgccttagcgagcagtttgaaaacctcgccaaccgtattttcgaacacagcaaccggcgggtcgatgagcaaaaccgccagagcctgcatggcctgctgacgccgctacgcgaacagctggacgggttccgccgccaggtgcaggagagctttggccaggaggcgcgtgaaagacataccctggcgcatgagatccgcaatctgcagcagttgaacgcgcagatggcacaggaggcgctgaacctgaccaaagcgctgaagggggataacaaaactcagggcaactggggggaagtggtcttaacccgcgtgctggaggcctccggcctgcgcgaaggctatgagtaccagactcaggtcagtattgagaccgacaaccgctcgcggatgcagccggacgttatcgtgcgcctgccgcagggtaaggacgtggtgatcgacgccaaaatgaccctggtcgcctatgagcgctatttcaacgccgaagacgactacacccgcgaagtcgcgctgcaggaacaccttgcctcggtgcgtaaccatattcgcctgctgggacgcaaggattatcaacagctgcctggcctgcgctcgctcgactatgtgctgatgtttattcccgttgagccggcgttcctgctggccatcgatcgccagcctgagctcatcagcgaggcgctgcaaaataatattatgctggttagcccgacgacgctgctggtagccctgcgcactatcgccaatctgtggcgctatgagcaccagagtcgtaacgcgcaaaagattgccgagcgggcggggcgcctttacgacaaaatgcgcctgtttgtggatgatatgtccgccatcggccagagcctggataaggcgcaagagagctatcgccaggcgatgaaaaagctcgcttccgggcgtggtaatctgctggcccaggcggaggcctttcgcggcctgggcgtggaggtcaagcgcgggattaatcctgatttagtcgaacaagctacggctcaggacgagcaatatcgtctcgaagatgaggataacctgccggaaaatgacgcattttcacccgactctgccgagacggtgcgtagccgggaggcggctccgccatgctgaaacgtatgggaaatgcgctgagtctgatacactcagtgaacattttcttgaaaagcaagcaggcatagagatggttgaggattcacaagaaacgacgcactttggctttcagacggtcgctaaagagcagaaagcagatatggtggcgcatgtattccattctgtcgccgcaaaatatgatgtgatgaacgacctgatgtcgtttgggatccatcgtttgtggaagcgtttcaccatcgactgcagcggcgtacgtcgcgggcagaccgtgctggatctggctggtggtaccggtgatttgacggccaagttctcccgcctggtaggggaaaccggccgcgtcatgcttgctgatatcaatgattctatgctcaaaatgggccgcgaaaagctgcgcaatatcggcatcgtaggcaacgttgagtatgttcaggccaacgcggaagccctgccttttgctgataatacctttgactgcatcaccatctctttcggtctgcgtaacgtgaccgacaaagagaaagcgctgcgttcgatgtatcgcgtgctgaagccgggcggacgtctgctggtgctggagttttctaaacccattatcgaaccgctgagcaaagcctacgacgcttactccttccatatcctgccgaaggtgggcgagctggtggcaaaagatggcgacagctatcgctacctggcggaatctattcgtatgcatccggaccaggaaaccctgaaagggatgatgcaggatgcgggcttcgaaaacgtggattactacaacctgacggcgggtatcgttgctttgcatcgcggttacaagttctgacaggagggacgctatgcctttcacacccctggttaccgctggcattgaaacggcgctgaatactttcctctggcgcgacaaagcgcttaaacccgctcgccagcgcctgctgggcaaggtattgcgggtccagctgcaggatttcgccacgcccgtggtgctggtattcagcgaacgccaggttgacgtcctgagcgcctgggacggagaggccgattgcaccgtgattacccggctcagcgtgctgccaaaactgcgcaatcgtcagcagctcacggcgcttattcgcagcggtgatctggaagtgcagggcgatctgcaggtggtgcagaatatggtctccctgtgcgacctggcagagtttgatcccgctgaactgctggcgccctataccggcgatattgtggccgaaggcgtcggtaaagtcctgcgcggcggcgctcagtttctgctgaagggggcagagcgccagcagcgctatgtcgcggaagcgatcactgaagagtggcgcctggcgccggggccgctggagctggcctggtttgctgaagagacaacggctattgagcgcgcgctggccgcactggaaaaacggctggaaacgctggagggcaaatgacgccaggagaattacggcgcctgtatttcatcatccacacctttttgagctacgggctcgatgagctcatccccaaaatgcggatcacgctgccgctgcgtatctggcggcggatgctgttctggatgccaaaccgccatcaggatcagcctcttggtgcccgccttcggctggcgctccaggagctggggccggtgtggataaaattcggccagatgctttccacccgccgggatctctttccgccgcatattgccgatcagctggcgctgttgcaggaccgcgtggcgccctttgaagggaagctcgcgcagcagcagatagagaaagcgatgggggggctgccggtcgagacctggtttgatgatttctccgttgagccgttagcctcggcgtccatcgcccaggtgcataccgcgcgtctgaaagagaatggcaaagaggtggtgatcaaggttatccgcccggatattttgccgatcattaaagcggacatgaagctcatctaccgcctggcgcgctgggtaccgcgtctgctgcctgacggtcgccgtctgcgcccgcaggaggtagttcgtgaatatgaaaaaacgctgctggatgagctgaacctgctgcgggaatccgccaacgctattcagctgcggcgtaatttcgaagacagcccgatgctgtacgtgccggaggtgtaccccgactactgcagcgaaagcatgatggtaatggagcgcatttacggtatcccggtgtccgatgtggaggcgctggaggcccagggcaccaatatgcagctgctggcggagcggggcgtccaggtcttcttcacccaggtgttccgcgacagcttcttccatgccgatatgcatcctggcaacatattcgtcagctacgagcatccggaagatccgcagtatatcggcatcgactgcggtattgtcggctcactgaacaaagaagataagcgctatctggcggaaaactttatcgcctttttcaaccgcgattatcgtaaagttgccgagctgcacgtcgattccggttgggttccgcccgataccaacgttgaagagtttgagttcgcgatccgcacggtctgcgagccgatctttgagaagccgctggcggagatctccttcggccacgtgctgcttaatctgttcaataccgcgcggcgtttcaatatggaagtccagccgcagctcgttttactacagaagacattactttacgtagaaggggtaggccggcagctctatcctcagttagacttgtggaaaacggcgaagcctttcctcgagtcgtggatcaaagatcaggtcggcattccggcgctggtgcgcgcgtttaaagacaaagcgccgttctggatcgaaagaatgccggaaatacctgagctggtgtatcagagcctgcagcagagtaaacagctgcagaccagcgtcgatactattgtgcgggatatgcatgtgcgtcatgtgcgccagggccaatcccgttacctgtttggtataggcgcggttttattgctcagtggtacgctgctctttatccatcgccctgagtggggaatgatgcccggttggctgatggccggcggtgtggtgacctggcttattggctggcggaaaacccactgatcggttcgcctcttcatgacgcaggcttatttgcgcaaaatcatgtcggcggcctgacgaagaggcggctcgcaggatggcgtgtataatgcgtccacacaattcatcatctgtcataggggaacgtgtatgggtggtatcagtatttggcagttattaattgttgtcgtcatcgtagttctgctttttgggacgaagaagctgagctcgctggggtctgacttaggggcatctatcaaaggctttaaaaaagctatgagtgatgatgataaacccgaaaagtcggcgccagacgcagatttcacggcgaaaaccatcgccgataaacaggatgatgcaaaaaaagacgagacaaaacgccacgacaaagagcaggtgtaactcgtgttcgatattggttttagtgaactactgctggtgtttgtgattggcctcattgttctggggccacagcggcttcccgtagcggttaaaacggtagttggctggatccgtacgttacgctcgctggcgaccacggtacaaaatgagctggcccaggagctaaaactgcaggagttccaggagagcctgaagaaggtggaaaaggctagcctgaataacctgacgccggagctgaaagcctcgatggatgaactgcgcgaggccgcggagtcgatgaagcgctcctatagcgcccacgatcccgaaaaagccagcgacgaagccaataccatccttaatccggtggtcaaaggcagcgaagcgcagcgccaggacgtcacgccggcgacggcagaacatcaggccagcgctccggctcatgcgccagatcccgttgccgccgagcaatctgcttcaccggctgaccttcaggcagagaaaacgtccgctacggcggcagttccccattcttcccccgcatcgagtgataaaccgtaaacatgggcgtagacgatacacaaccgctaatttcgcatctgattgagctgcgcaagcgtctgctcaacagcatcattgctattctggtgatcttcctggcgctggtctatttcgccaatgatatctaccagctggtctcggccccgcttatcagtaagatgcctgtgggcgcgacgatgatcgccaccgatgtcgcttcacctttctttacgccgataaagttgaccttcatggtgtcggtgatcctgtcggtgccgattattctttaccaggtatgggccttcgtcgcgccggcgttgtataagcacgaacgccggctggtggtgcctttactggtatccagtaccctgctgttctatatcggcatggctttcgcctattttgtcgtgtttccgctggcgttcggcttcctgacccatgcggcgccggaaggggtgctggtctcgaccgatattcgcagctatctcgacttcgtgatggcgctgtttatggcattcggggtctcctttgaggtgccggtcgccattgtgttgctctgctggatgggcgttaccacgccggaagacttgcgtaaaaaaaggccgtatgtgctggtgggtgccttcgtggtgggcatgctgctgacgccgccggacgtattctcgcagacactgctggccattccgatgtactgtctgtttgaagtcggggtgttctttgcccgcttctacaccgggaagcgcctgacgcgcgatgacgacgccgcggccgaagctgaagccgcagagcacagagaagagtaataccgccaaccgcccgtcagggcggttggcatatgggagcgatcatgtttgatatcggcgttaatctgaccagttcgcagttttcccgcgatcatgatgaggtagtggcgcgcgccctggcggcgggggttaacggcatgctgctgaccggcacaaatttggcggagagccagcaggcgcagaaactggcgagccgctattccggctgctggtccacggcgggggttcatccccatgacggtagcagctggacgccagcggtcgccgaggcgatttataccctcgccggcgagccgcaggtggtggcgataggcgagtgcggtctggattttaaccggaatttttccacgccgcacgagcaggaggtagcgttcagcgcccagctggcgctggccgctgagctgtcgatgccggtgtttttgcactgccgcgacgcccacgatcggtttctgacgctgcttaaaccctggcttgagaagctcccgggcgcggtgctgcactgctttaccggcagccgcagcgaggtgcaggaatgcctggatctgggcctgtttatcggtattaccggttgggtttgcgatgagcggcggggactggagctgcgcgagctgctgccggcgatcccggcggaacgtctgctgctggagaccgatgcgccttatctgctgccgcgcgatctcaagccgaaaccggcctcgcggcgtaacgagcccgcgtatttgccgcatatcctggccagcgtcgcggcctggcgcggcgaggaggcgcaatggctggaggcgcaaacggacgcaaacgtcagggcgctgtttggcgtcgacattaacggcgtttagattttctggaagtcggtatttttaacgctctgcaggacttgcttattcagcaggtttaacagcaacatagagcgcgcttcgccgtcgggctcggtgaagatcgcctccaggccttcaaacgcgccgtcggtgattagcacgctatcgccctcatgcggcgtttccgggtcggtaatcccttccggtttgtagatagaaagctgatggatgaccgccgaggggacgatagcgggtagggcgccaaagcgcacgaagttgttaaccccgcgagtggcgctgatggtggtggtatgaatcacctctggatcgaactcaataaacaggtagttcgggaacaacggttcgctgaccatggtgcgtttaccgcgaatgattttttccagcgcaatcgtcggcatcaggcagttaactgactgacgttccagatgttcctgggctcgttgtagctgcccacgtttgcaatacagtaagtaccaggcttgcataatgactcattccacttctaataacggcaagcataacaaatggctggtgtaatcgcgaaagccattataattgaaatccaaatttcagcgttctttcacgctaatttaacaaaattacagcatcgcgccgtcgaacaccgtataattagccgcctgtagagaggtcaataacacttccatgaaatatcacgatcttcgcgactttctgacactcctggaacaacagggcgaactaaaacgtatcactctgccggtcgatcctcacctggaaatcaccgaaattgccgaccggactctgcgcgccggcggcccggcgttgctgtttgagaatccgaaaggctataccatgccggtgctgtgcaatctgttcggcacgccgcgtcgcgtggcgttggggatggggcaggaggatgtcagttcgctgcgcgaggtgggtaaactgttggcctttctgaaagaacctgagccgccaaaaggcttccgcgacctgtttgataagctgccgcagttcaagcaagtgctgaatatgccgaccaaacgcctgcgcggcgccccctgtcagcaaaaaatcatccagggcgatgatgtcgatctgaataaaatcccgattatgacctgctggccggaagatgccgcgccgctgatcacctgggggttgacggtaacccgcgggccgcacaaagagcggcagaacctgggaatttatcgccagcagctgatcggcaaaaacaaactgattatgcgctggctgtctcatcgcggcggcgcgctggatttccaggagtggtgcgcggcgcgtccgggcgaacgcttcccggtttccgtggcgcttggcgccgatccggcaaccattcttggcgcggtgacgccggtgcccgataccctgtcggaatatgctttcgcaggcctgctgcgcggcaccaagaccgaagtggttaagtgcgtttccaatgaccttgaagtgccggccagcgcggaaattgtgcttgaaggctacattgaggccggtgaaatggcgccggaaggcccgtatggcgatcacaccggttactacaatgaagtggacagcttcccggtatttacggtaacccatattacccagcgtgaagacgcgatttatcattctacctataccggccgaccgcccgatgagccagcggtgctgggcgtggcgctgaatgaagtctttgtgccgatcctgcaaaagcagttcccggaaatcgttgatttctatctgccgccggaagggtgctcctatcgcctggcggtggtgaccatgaaaaaacagtacgcgggacatgccaagcgcgtaatgatgggcgtctggtcgttcctgcgccagtttatgtacaccaagttcgtgattgtctgcgatgacgacgtcaatgcacgcgactggaacgatgtgatttgggcgatcactacccgtatggacccggctcgtgatacggtactggtagagaatacgccaattgattatctggattttgcctcgccggtttccggcctgggttcaaaaatggggctggatgccaccaataaatggcctggcgaaacccagcgtgaatggggtcgcccaatcaaaaaagatcctgccgttacggcgcgtattgacgccatctgggatgaactggccatctttaaacaacagtaagcggggctaacgccgctgttttgctctattgacccgacagaggggacgcatgacaaccttaagctgtaaagtgacctcggtggaggcgattaccgataccgtatatcgtgttcgattagtgccggaagcggcattttccttccgtgccggccagtatctgatggtggtaatggatgagcgcgacaagcgcccgttctccatggcttccacgccggcggaacaggaatttatcgagctgcatatcggcgcctcggagctcaatctgtacgcgatggcggtcatggatcgcattctgaaagagcgtgaaattgaggttgatattccgcatggcgaagcgtggctgcgcgatgacgaagatcgcccgctgattctgatcgccggcggtaccggattctcttatgtgcgttctattctgttaagcgcgctggcgcgtaacccggatcgcgatatcgccatttattggggcggccgcgaggctaagcatctgtacgatctggccgagctggaagcgttaagcatcaagcatccgaatctgcgcatcgagccggtggtcgaacagccggaagaagggtggcgtggtcgctccggtacggtactcaccgccgtgctgcaggattacggtacgctggccgagcatgacatctacattgccggtcgttttgagatggcgaagatcgctcgcgacctgttctgtaatgagcgcggcgcgcgtgaagatcgcctgtttggcgatgcgtttgcgtttatctgaaaataaaaaacccgcccctgacaggcgggaagaacggcaactaaacctgctctcttcgccatagccgccaggttctggtggcaatggcgttgagataccctttcgcttaaacccgctcaaacacggtagcgatcccttgtcccaggccgatacacatggtggcgaggccgaactgagcgtctttgcgctccatctggttgatcagcgtggtgctaatacgcgccccggaacagcccagcggatgaccgagcgcgatcgccccgccgttgaggttgatcttctcatcgatctgctccattaagcccagatctttaatacacggtaggatctgcgcggcaaatgcttcattcatttcaaaaacgtcgatatcgctggtggataagcccgcttttttcagcgccagctttgaggccggaaccgggccataacccataatggacgggtcgcagccgaccaccgccattgaacggacgcgagcgcgcggcttcagccccagctcgcgagcgcggctttcgctcatcagcagcatcgccgctgcgccatcggaaagggcggaagaggtacccgccgttaccgtaccggtcaccgggtcaaacgccggtttaagcgtggacagcgtctcgacggtggtttccgggcggatcacctcgtcatagttaaaggacttgagtacgccatcggcatcgtggccgccggtggggataatctccgctttgaatgcgccggactgggttgcggcccaggcacgagcgtgagagcgcgcggcgaactgatcctgcatctcgcggctaataccgtgcagacgcgccagcatctccgcagtcagccccatcatccctgccgcctttgccacgttgcggctgaggcccggatggaaatcgacgccgtggctcattggcacatggcccatgtgctcgacgccgccaatcaggcagacgctggcatcgccggtcatgatcatacgggccgcatcgtgcagcgcctgcatggaagaaccgcacagacggttgaccgtatttgctggtaccgaatgcgggatctccgccagcagcgccgcgtttcgggcgatgttaaaaccctgctcgagggtttgctgcacgcaaccccagtagatatcgtctatcgcgcttgcctcaagcgacggattgcgcgacagcaggctacgcatcaggtgcgcggagaggtcttccgcgcgcacgtggcgaaatgcgccgcccttcgaacggcccatcggggtgcgaattgcatcgacaatgacaacctgttccattgtgactccttaagccgttttcagagcgccaaccggacgggctggctctacctggggataatacgcttcgttatggcgcgctttgtcacgcagaccggctggcacttcatacagcgggccaaggtgctggtattgctgcgccatatcgagatacttcgcgctgccgatggtgtccagccagcggaatgcgccgccgtggaacggagggaagcccaggccgtataccagcgccatatccgcttccgccgggctggcgataatgccttcttccaggcagcggacgacttcgttaaccatggggatcatcatgcgggcgataatctcttcatcgctgaaatcgcgcttcgactggctgacgtcggccagcaggctgtcgacggtagcatcttcttctttcttcggcttacctttgctgtcgtctttatagcgccagaagccgaggccgttcttctggccgaaacggttggcgtcaaacagggcgtcgatggcgtcgcgataatctttctgcatccgctgcgggaagcccgccgccatgaccgcctgagcatggtgcgcggtatcgatgccgaccacgtccagcagataagccgggcccatcggccagccaaactgtttctccatcactttgtcgactttgcggaagtccgccccgtcgcgcagcagctggctgaagccggcgaagtaggggaacagtacccggttgacgaagaagccgggacaatcattcaccacaatcggcgttttgcccattttgctggcccaggccaccactttggcaatggtattatccgaggttttttcgccgcggatcacttcaaccagcggcatgcgatgcaccgggttaaagaagtgcataccgcagaagttttccgggcgctgcagaacgctggccagctcgctgatggggatcgttgaggtgttggacgccagcacggtatccgggcgcacttttgactcggtttccgctagtacggctttcttcactttcgggttttccaccaccgcttcaacgacgacgtccacgcggtcaaaaccgctgtattccagggttggctgaatggtgctaatcactccggccagcttcagaccgtcgattttgccgcgttccagctgtttattcagcagcttcgccgcttcggtcatgccaagggtcagcgatttgtcgctgatgtctttcatcaccaccggcacgcccttccaggctgactggtaagcgataccgccgcccataatgccagcgcccaggacggcagcatgcttcggcgtctcgacatctttggtcagctttttcgctttcgctttgacgtactggtcgttcaggaagataccaaccagcgcgcgggcctcattggtatgggccagcgggacaaagtttttattttccagcaccagggcttcttcacgaccaagacgcgcggcggcttcaatggttttgaccgcggtgatcggcgccgggtaatgcttcccggcggtttgcgcgaccatgcctttggcaatcgtgaagctcatggcggcttcaattttgctgagcttcagcggctccagcttcggctgacgtttcgctttccagtccaggtcgccattcatggcctgacgtaggatcgccagcgcgccgtcgcgtagtttttccgcagcgaccacgccatccaccaggccgattttcagtgcttgatcggcgccgacgtctttcccggcggcaataatttccagcgcgctatcggcgccgagcaggcgcggcagacgcacggaaccgccgaagcccggcataatgccgagcttggtttctggcagcccaatgcgcagatccggcgtggcgaggcgatagtcggtcgccagcacgcattcgcagccgccgcccagcgcatagccattgacggcagagatagtggggacggggagatcttccagacgattgaagacgctgttagcaaaatgcagccactggcttaactgctcctcagggaccaggaacagcgagaggaattcggtgatatccgcgccgacgataaatgccgctttttcagagcgcagcagcagacctttgagatcgctttgtttttccagtacgtccagcgcatgaccgaggctggctacggttgcggtatcaagcttgttgaccgaacctggggcatcgaacaccagttcggcgatgccatcttccagccagtcgaggtacagggtgtcgcctttgtagagcatgtcagtctcctgaatccagcaatatgatctggtcataccagatgaaacggagtgtggaatttatgttaaagaattgcaaattactctttaaataattgctggtcggatcacatccggcggaaatcacccgcacgcaggtcgatgtgctaagatgcggtgtatcacgatcccataaaagcaaaggataaaagatggaatccctggccgcgctctataaaaatcatattgttaccctacaagaacgtacccgcgacgtcctggcccgttttcaaatggatgctctgctgattcactccggcgagctggttaacgtcttccttgatgaccatccgtacccgttcaaggtcaatccgcagttcaaagcctgggtgcctgtgactcaggtgcctaactgctggctgctggtggacggtgtgaataaaccgaagctgtggttctatctgccggtagattactggcataacgttgagccgttgccgacctctttctggaccgaagagatagacgtgatcgcgctaccgaaggccgatggcatcggcagccagctgcctgctgctcgcggtaatattggctatatcggtccggtgcctgagcgcgcgctgggcctgggtatcgccgcggataagatcaacccgaaaggggttatcgactacctgcattactaccgggcttacaaaaccgattacgagctggcctgcatgcgtgaagcgcagaagtcggcggtgaatggtcatcgtgcggcctacgaagctttccagtcgggaatgagcgaattcgatatcaaccaggcctatctcaccgccaccggccatcgtgataccgacgtgccttacagcaatattgtcgcgctgaatgagcatgcctccgtcctgcactacaccaaactggaccatcgtgccccggcggagatgcgcagtttcctgctcgacgccggtgcggaatataacggctatgccgcagatctgacgcgcacttgggcggcgcacggcgataacgactttgcccatctgatcaaagacgttaacgatgagcagcaggcgctgattagtaccatgaaggccggtaccagttacattgattaccatatccagttccatcagcgtatcgcgaagctgttgcgtaaacaccagttggttaccgacatgagcgaagaggcgatggtggagaatgacctgaccgggccgtttatgccgcacgggattggccatccgctgggtctgcaggtgcatgatgtcgctggctttatgcaggatgacaccggtacgcatctggcggcgccgtcgaaatacccgtatctgcgctgcacccgtattatcgagccgcggatggtgttaactattgaacccggcatctacttcatcgagtcgttactggcgccgtggcgtgagggcccgttcagcaagcactttaactggcaaaaaattgacgccatgaagccgttcggtgggatccgtatcgaagataacgtggtgattcacgaaaacagtatcgaaaatatgacgcgcgatctgaagctggcctgatggagagctggttaatcccggcggcgccggttaccgtcgttgaggagattaaaaaaagccgttttatcacgctgttggcgcataccgacggcgtggcggcggcaaaagcttttgtcgagtccgtcagagcggatcaccctgatgcccgccaccactgcgtggcgtgggtcgcggggccgcctgatgattcgcaacagctggggttttcagacgatggcgaaccggcgggaacggcgggtaaaccgatgctggcgcagctgatgggaagcggcgtcggcgagataaccgctgtcgtcgtgcgttactacggtggtatcctgctgggcaccggcggtctggttaaggcctatggcggcggggtgcatcaggcgctggcgcagctgacgacgctgcgcaagacgccgttaacggcatatactttgcagtgtgagtatgggcaactggccggcgtcgaagcgctgctcgcccaattctccggaaacgtcgttgaaagcgaatatctggcgtcagttcggctgcgcgtggcgcttccccaggccgaagtggcggctttttcagcaagactggctgattttagtcgtggttcattgcaattactgaagattaacgaataatcccctctgttttttgcctatcaaaggaagcgccagagatgcattttcgcgccataacccgaatcgttggactgctggtcatcttgttttcggggacgatgatcgtcccgggattagtggccctgatatatcgcgatggcgcgggacgggccttcactcaaaccttctttgtcgctctggcgatcggctccatgctgtggtggccgaaccgtaagcaaaaaggcgaactgaaatctcgtgaagggtttctgatcgtggtgctgttctggaccgtgctggggagcgtgggggccttgccctttatcttctccgaacagccgaacctgacggtgacggatgccttcttcgagtcattttccggcctgacgacgaccggggcgaccactctggtggggctggactcgcttccgcacgctatcctcttttatcgccagatgctgcagtggttcggcggcatggggatcattgtgctggcggtagcgattctgcctatcctcggcgtcggggggatgcagctctaccgcgcggaaatgcccggcccgctgaaggataacaagatgcgtccgcgtattgccgagacggcgaagacattgtggctcatctatgtgttactcacgatcgcctgcgcattggcgctctggtttgccggtatgccggcgttcgatgcgatcgggcacagtttcgccaccatcgccatcggcggtttctcgactcacgatgccagcgtcggctatttcaacagcccgatgatcaactccatcattgccatcttcctgctgatctccggctgtaactacggtctgcatttttcgttgttgagcggacgcagcctgaaggtgtactggcgcgaccctgaatttaggatgttcattggcgtccagttgacgctggtcatcgtctgtacgctggtgctatggcttcataacgtgtacggctcggtgttgacgacgctgaaccaggcgtttttccaggtggtgtcgatggcgaccaccgcggggttcaccaccgatagcattgcacgctggccgctgttccttccggtgctgttgctgtgctccgcatttatcggcggctgcgctggctccacgggcggtggattaaaagtgatccgtatcctgttgctgttcaagcagggcaaccgtgagctgaagcggctggtgcacccgaatgcggtgtatagcattaaattaggtaaccgcgcgctgccggaacgtattctggaagcagtatggggattcttctccgcctatgcgctggtctttatcattagtatgctggcgattatcgccaccggggtggatgacttctctgctttcgcctccgtggtggcgacattgaacaacctcgggcctgggctcggcgtcgtcgcggataactttgccaccatgaacccggtcgcgaaatggatcctgattgctaatatgctgtttggtcgtctggaagtgttcaccttactggtgctctttacccccactttctggcgcgaataacaggagtgctcgtgaaaactttaattctcttctccacccgcgacgggcagacccgtgaaatcgcttcgtttctcgcctctgagcttaaagagctgggcatcgatgcggacaccctgaacctgaaccgtaccgatgtcgtcgaatggcatcactacgatcgggtggtcattggcgcgtcgattcgctatgggcactttcatccggcggtggaccgctttgtgaaaaagcatctggcagcattgcaggcgctgccgggggcattcttttcggttaacctggtggcgcgtaaacccgagaagcgcacgccgcagaccaacagctatacgcgtaagtttctgctgaactcgccgtggcagccgcagagctgcgcggtatttgccggcgcgctgcgctacccgcgctacagctggtacgatcggtttatgatccgcctgattatgaaaatgaccgggggtgaaacggatacccgcaaagaagtggtctataccgactggcaacaggtatcccggtttgctcgggaaatcgcacaaatggcgcgcaaatagcgcgtaaaactcgcgttgtgatggaaaatcgagcgaacgaaaagtttttttgcatttccccttgccacctcagaattactccctataatgcgcctccactgacacggaacaacggcaaacaagccgccgggtcagcggggttccggtgagaacctcgcagagaaaagcaaaaataaatgcttgactctgcagcgggaaagcgtaatatgcacaccccgcgccgcagcgaaaacgaagcggcactgctctttaacaatttatcagacaatctgtgtgggcactcaaagtgacatggattcttaacgtcctcggacgaaaaatgaataccaagtctcaagagtgaacacgtaattcattacgaagtttaattctttgagcatcaaacttaaattgaagagtttgatcatggctcagattgaacgctggcggcaggcctaacacatgcaagtcgagcggtagcacagagagcttgctctcgggtgacgagcggcggacgggtgagtaatgtctgggaaactgcctgatggagggggataactactggaaacggtagctaataccgcataacgtcgcaagaccaaagtgggggaccttcgggcctcatgccatcagatgtgcccagatgggattagctagtaggtggggtaacggctcacctaggcgacgatccctagctggtctgagaggatgaccagccacactggaactgagacacggtccagactcctacgggaggcagcagtggggaatattgcacaatgggcgcaagcctgatgcagccatgccgcgtgtgtgaagaaggccttcgggttgtaaagcactttcagcggggaggaaggcggtgaggttaataacctcatcgattgacgttacccgcagaagaagcaccggctaactccgtgccagcagccgcggtaatacggagggtgcaagcgttaatcggaattactgggcgtaaagcgcacgcaggcggtctgtcaagtcggatgtgaaatccccgggctcaacctgggaactgcattcgaaactggcaggctagagtcttgtagaggggggtagaattccaggtgtagcggtgaaatgcgtagagatctggaggaataccggtggcgaaggcggccccctggacaaagactgacgctcaggtgcgaaagcgtggggagcaaacaggattagataccctggtagtccacgccgtaaacgatgtcgatttggaggttgtgcccttgaggcgtggcttccggagctaacgcgttaaatcgaccgcctggggagtacggccgcaaggttaaaactcaaatgaattgacgggggcccgcacaagcggtggagcatgtggtttaattcgatgcaacgcgaagaaccttacctggtcttgacatccacagaacttagcagagatgctttggtgccttcgggaactgtgagacaggtgctgcatggctgtcgtcagctcgtgttgtgaaatgttgggttaagtcccgcaacgagcgcaacccttatcctttgttgccagcggttaggccgggaactcaaaggagactgccagtgataaactggaggaaggtggggatgacgtcaagtcatcatggcccttacgaccagggctacacacgtgctacaatggcatatacaaagagaagcgacctcgcgagagcaagcggacctcataaagtatgtcgtagtccggattggagtctgcaactcgactccatgaagtcggaatcgctagtaatcgtagatcagaatgctacggtgaatacgttcccgggccttgtacacaccgcccgtcacaccatgggagtgggttgcaaaagaagtaggtagcttaaccttcgggagggcgcttaccactttgtgattcatgactggggtgaagtcgtaacaaggtaaccgtaggggaacctgcggttggatcacctccttaccttaaagaacctgcctttgcagtgctcacacagattgtctgatgaaaatagagcagtaagtaatctctgcaggcttgtagctcaggtggttagagcgcacccctgataagggtgaggtcggtggttcaagtccactcaggcctaccaaattcgctctcgtgctttgttgtggcaaagctcgcatacttcagtatgcttcgcttcaccacgccgcgcccgaaaacgaattaaggttaaagagattcattcgatggggctatagctcagctgggagagcgcctgctttgcacgcaggaggtctgcggttcgatcccgcatagctccaccatctttactgcgaacacaagaaaacttcagagtgaacctgaaaaggtgcactgcgaagttttgctctttaaaaatctggatcaagctgaaaattgaaacgacacacagtcaatgtgtgttcgagtctctcaaattttcgcaatcagaagtgaaacatcttcgggttgtgaggttaagcgactaagcgtacacggtggatgccctggcagtcagaggcgatgaaggacgtgctaatctgcgaaaagcgtcggtaaggtgatatgaaccgttataaccggcgatgtccgaatggggaaacccagtgcaattcgttgcactatcgttaactgaatacataggttaacgaggcgaaccgggggaactgaaacatctaagtaccccgaggaaaagaaatcaaccgagattcccccagtagcggcgagcgaacggggagcagcccagagtctgaatcagcttgtgtgttagtggaacggtctggaaagtccgacggtacagggtgatagtcccgtacaccaaaatgcacaggttgtgaactcgaagagtagggcgggacacgtggtatcctgtctgaatatggggggaccatcctccaaggctaaatactcctgactgaccgatagtgaaccagtaccgtgagggaaaggcgaaaagaaccccggcgaggggagtgaaaaagaacctgaaaccgtgtacgtacaagcagtgggagcaccttcgggtgtgactgcgtaccttttgtataatgggtcagcgacttatattctgtagcaaggttaaccgtataggggagccgcagggaaaccgagtcttaactgggcgttaagttgcagggtatagacccgaaacccggtgatctagccatgggcaggttgaaggttgggtaacactaactggaggaccgaaccgactaatgttgaaaaattagcggatgacttgtggctgggggtgaaaggccaatcaaaccgggagatagctggttctccccgaaagctatttaggtagcgcctcgtgaattcatcttcgggggtagagcactgtttcggctagggggtcatcccgacttaccaacccgatgcaaactacgaataccgaagaatgttatcacgggagacacacggcgggtgctaacgtccgtcgtgaagagggaaacaacccagaccgccagctaaggtcccaaagtcatggttaagtgggaaacgatgtgggaaggcacagacagccaggatgttggcttagaagcagccatcatttaaagaaagcgtaatagctcactggtcgagtcggcctgcgcggaagatgtaacggggctaaaccatgcaccgaagctgcggcagcgacactatgtgttgttgggtaggggagcgttctgtaagcctgcgaaggtgtgctgtgaggcatgctggaggtatcagaagtgcgaatgctgacataagtaacgataaagcgggtgaaaagcccgctcgccggaagaccaagggttcctgtccaacgttaatcggggcagggtgagtcgacccctaaggcgaggccgaaaggcgtagtcgatgggaaacaggttaatattcctgtacttggtgttactgcgaaggggggacggagaaggctatgttagccgggcgacggttgtcccggtttaagcatgtaggctggttgtccaggcaaatccggataatcaaggctgaggtgtgatgacgaggcactacggtgctgaagtaacaaatgccctgcttccaggaaaagcctctaagcatcaggtaacatcaaatcgtaccccaaaccgacacaggtggtcaggtagagaataccaaggcgcttgagagaactcgggtgaaggaactaggcaaaatggtgccgtaacttcgggagaaggcacgctggtgtgtaggtgaagtccctgcggatggagctgagaccagtcgaagataccagctggctgcaactgtttattaaaaacacagcactgtgcaaacacgaaagtggacgtatacggtgtgacgcctgcccggtgccggaaggttaattgatggggttatccgtaaggagaagctcttgatcgaagccccggtaaacggcggccgtaactataacggtcctaaggtagcgaaattccttgtcgggtaagttccgacctgcacgaatggcgtaatgatggccaggctgtctccacccgagactcagtgaaattgaactcgctgtgaagatgcagtgtacccgcggcaagacggaaagaccccgtgaacctttactatagcttgacactgaacattgagccttgatgtgtaggataggtgggaggctttgaagcgtggacgccagtctgcgtggagccaaccttgaaataccaccctttaatgtttgatgttctaacgttggccccttaccggggttgcggacagtgtctggtgggtagtttgactggggcggtctcctcccaaagcgtaacggaggagcacgaaggttagctaatcctggtcggacatcaggaggttagtgcaatggcataagctagcttgactgcgagcgtgacggcgcgagcaggtgcgaaagcaggtcatagtgatccggtggttctgaatggaagggccatcgctcaacggataaaaggtactccggggataacaggctgataccgcccaagagttcatatcgacggcggtgtttggcacctcgatgtcggctcatcacatcctggggctgaagtaggtcccaagggtatggctgttcgccatttaaagtggtacgcgagctgggtttagaacgtcgtgagacagttcggtccctatctgccgtgggcgctggagaattgaggggggctgctcctagtacgagaggaccggagtggacgcatcactggtgttcgggttgtcatgccaatggcactgcccggtagctaaatgcggaagagataagtgctgaaagcatctaagcacgaaacttgccccgagatgagttctccctgagactttaagtctcctgaaggaacgttgaagacgacgacgttgataggccgggtgtgtaagcgcagcgatgcgttgagctaaccggtactaatgaaccgtgaggcttaaccttacaacgccgaagatgttttggcggatttgagagaattttcagcttagattcagagttgagtacgcaatataaagaattgcgtactgagcacaaagaatttgcctggcggcactagcgcggtggtcccacctgaccccatgccgaactcagaagtgaaacgccgtagcgccgatggtagtgtggggtctccccatgtgagagtagggaactgccaggcatcaaataaagcagaaagcccggtcgaaagaccgggctttttgttttatctgttgtttgtcggtgagcgctctccagagtaggacaaatccgccgggagcggatttgaacgttgcgcagcaacggcccggagggtggcgggcaggacgcccgccataaactgccaggcatcaaacaagtgaagagcccatcctgccggatgggctttttgcgtttctgttgtccggccagcgtgccggtatgtctccccggtggcgctgcgcttaccggggctacgggcctgtcgcgttctgtagcccgcaccggtacaccacatcaccaccggtaacgccccgcaatatcattgcccctgtaatcagacaagccttcccccgccagatacgataaactaacgccgattttgcatcaggaagccactatgaaccactccctcaaaccctggaatacctttggcattgaacgcttcgccaagacgatagtacgcgccgaaactgagcaacagttgctaagcgcctggcaaaccgctgccgcggcaggcgaacccacgctgatccttggggaaggcagtaatgtcctgtttctgaacgactatgccggtacggtgatcctcaaccggattatggggatcgaggtgagcgaaacgccggaagcctggcgcttgcacgtcggcgccggcgaaaactggcatcagttggtgcagttcacgctacagcatgcgatgccaggtctggaaaatctggcgttaatccctggctgcgcaggatcttcgccgatccagaatattggcgcctacggcgttgagctacagcgggtttgcgaatatgttgactgcattgagctggaaaccgggcgtaagcaacgtctttcagccgcggaatgccgttttggctatcgcgacagtatcttcaaacatgaatatcaggaccgctatgccatcgtcgcgattggcttatcgttagcgaaaacatggcagcctgtactgagttacggtgatttaacgcgtctcgatccgcagaccgtcacgccgcagcaggtatttgatgcggtctgtcatatgcgaatgactaaattgccggatccaaagattaacggtaatgccggcagcttttttaagaatccgatcgtcagcgctcaggttgcggaagcgctgctggcgcagttccctcatgcaccgcactatccgcaggcaaatggcagcgtcaagctggccgctggctggctaatcgatcaatgtgagctcaaaggacaacgcatcggcggcgcggccgtccatcgacagcaggcgctggtactgattaatgaagatcgagcgaccagcgaggatgtggtgaaacttgctcattatgttcgccagcgggtgggtacgaaattcgatgtatggcttcagcccgaggtgcgcttcattggcacgcatggtgaagtcaacgcagaggagagcattgcgtgaaagaccatactatccctttaacgctaatttctatccttgctgatggtgagtttcactctggcgaacagcttggtgagcagttaggcatgagccgggcggcgattaataagcacatccagaccttacgtgactggggcgtcgatgtgtttactgtgccgggcaagggttacagcctgccggagcctattcatctattagatgagaaaaagatttctcaagagatagaccatggccgagtgacggtccttcccgtcatcgactctactaaccagtatttgctggacaggcttgatgagctgacgtccggagatgcctgtgtggctgaatatcagcaagcagggcgaggccggcgaggcagaaaatggttttcgccctttggcgcgaatctctatctctcgatgtactggcgtctggagcagggcccggcagcggctattggcctaagcctggtgatcggtattgtgatcgctgaagttctgcagcagctcggggccgaacaggttcgcgtgaaatggccaaacgatatttacctgcaggatcgtaagctgtcagggatcctcgtggaactgacggggaaaacgggcgatgccgcacaaatcgtcagcggcgcgggtatcaaccttgtgatgcgtcgcgtggagtctgatgtcgtcaatcaggggtggatcagccttcaggaagcgggggtggtcatcgaccgtaacctcctcgccgcgcgcctgattaaagagctgcgcctgggactggagctgttcgagcaggaaggattggctccctatctaccgcgctgggaaaaactggataactttattcatcgcccggtgaaactgattatcggtgataaagaaatttacggcatttcgcgtggcattgacgcccagggcgcactattgctggagcaggatggtgtaataaaagcctgggtgggtggtgaaatatcattgcgcagtgcagaataaaaaagggagcttcggctccctttttttatttacgtaagcgtacctgattcactgagtgattggcgctcttagtcatgatcaggctggcgcgctcgcgagttggaaggatattttctttaagattcattaggttgatttcattccatagcgaagtggcaatatctaccgcttcttccttcgagagcttagcgtaattatggaaataggaatccggatcggtaaacgccccttcccggaatttaagaaagcggttgatataccagcttttcaataattcttccggggcatcgacataaatagaaaagtcgacaaaatcggaaacgaatacatgatggggatcgtgcggataatccattccactttgcagaacattcagcccttcaagaattaaaatatccggttgcgcgacggttttgtcaccgttgggaataacatcataaatcagatgggaataaaccggcgcggttgcctgcggtacccctgatttgagatcggagacaaacttcaccaggcgatgcatatcataggactgcggaaagccttttttcttcattaacccacgttcttttaaaaccgagttagggtgcaaaaaaccgtcggtggtaatgagttcgacatggcgatgctccggccaacgactaagcaaagcttgcagaacgcgggcggtggtgctttttcctaccgcaacgctgccagcgatactgataatatagggaattcgctgaccattggtgccaagaaattgttcgagaacagcctggcgacgcaggttagaactgatatagaagttgagcaaacgcgacagcggcaaatagatctcggcaacctcttccagagagagatcttcgttgatgccttttaaccgcgtgatttcttcctcggttaacgtcatcgggacagaatcacgaagtgcagcccattggtggcggttaaattgtaggtacggtgtcattaacgtctgctctttttggctcataagcatgttcttactatcaccgaataccttgaaacggtgatgcttcacacgagttaatcaggacaatgggcaggagggtaacaccagattgccgggaataataagaaaaaaactcattgaatgctgctttctcgcgccagcatcacaagagaagaataagtttcttatgctttgcaaagcatggcctttgctaacaggctaggctagcggcctgaatcctttccgtcagcggtcagcatgcgatagaggtaaccggagatgatcggacagcgcctgaagcgccgaattgttggcgaatatttgcactccgctgcttgaaattacaccgttttttcgcgtgagagcacaaaatgtgagcaagagaacgttttatgcaaatttttagttgcatgaactcgctcctctccctagaatgcgcgctacttgatgccgacttagctcagtaggtagagcaactgacttgtaatcagtaggtcaccagttcgattccggtagtcggcaccataacaatttgggtggggttcccgagcggccaaagggagcagactgtaaatctgccgtcatcgacttcgaaggttcgaatccttcccccaccaccactttctggcgacgctttgcggagccggagttggttgggtaaactaatcagctcaatactaaagagagcagtctctttagtattacagaaagaactgggtagccgagtttcaggatgcgggcatcgtataatggctattacctcagccttccaagctgatgatgcgggttcgattcccgctgcccgctccagacgtgctgatatggctcagttggtagagcgcacccttggtaagggtgaggtccccagttcgactctgggtatcagcaccacttcttttctctccttccctgtttctcttctgttatgttcattcaacaagtcgggcatgttgcctggttgatgtggtgatatcaccgatttatccgtgtcttagagggacaatcgatgtctaaagaaaagtttgaacgtacaaaaccgcacgttaacgtcggtactatcggccacgttgaccatggtaaaacaacgctgaccgctgccatcactaccgtactggctaaaacctatggtggttccgctcgcgcattcgaccagatcgataacgcgccggaagaaaaagctcgtggtatcaccatcaacacctctcacgttgaatatgacaccccgactcgccactatgcgcacgtagactgcccgggccacgccgactatgttaaaaacatgatcaccggtgctgcgcagatggacggcgcgatcctggttgttgctgcgactgacggcccgatgccgcagactcgtgagcacatcctgctgggtcgtcaggtaggcgttccgtacatcatcgtgttcctgaacaaatgcgacatggttgatgacgaagagctgctggaactggttgagatggaagttcgtgaactgctgtctcagtacgatttcccgggcgacgacaccccgatcgttcgtggttctgctctgaaagcgctggaaggcgacgcagagtgggaagcgaaaatcatcgaactggctggccacctggatacctatatcccggaaccagagcgtgcgattgacaagccgttcctgctgccgatcgaagacgtattctccatctctggtcgtggtaccgttgttaccggtcgtgtagagcgcggtatcatcaaagtaggtgaagaagttgaaatcgttggtatcaaagaaaccgcgaaaaccacctgtactggcgttgaaatgttccgcaaactgctggacgaaggccgtgctggtgagaacgtaggtgttctgctgcgtggtatcaaacgtgaagaaatcgaacgtggtcaggtactggctaagccgggcaccatcaacccgcacaccaagttcgaatctgaagtgtacatcctgtccaaagatgaaggcggccgtcatactccgttcttcaaaggctaccgtccgcagttctacttccgtactactgacgtgactggcaccatcgaactgccggaaggcgtagagatggtaatgccgggcgacaacatcaaaatggttgttaccctgatccacccgatcgcgatggacgacggtctgcgtttcgcaatccgtgaaggcggtcgtaccgttggcgcgggcgtggttgctaaagttctcggctaatcgctgataacatttgacgcaatgcgcaataaaagggcatcatttgatgccctttttgcacgctttcacaccagaacctggctcatcagtgattttatttgtcataatcattgctgagacaggctctgaagagggcgtttatacaccaaaccattcgagcctcagggcgacggctaatcaactccttctttgcaacagcagggcaggggtgacaccaccgtcaacattgaagcaatttgaatagttaagtgtataatccgaaacttaatttcggtttggatcgcctcgcccccgcggggtgaaattgtttgtagaatacttctgacaggttggtttatgagtgcgaataccgaagctcaagggagcgggcgcggcctggaagcgatgaagtggattatcgttgccgtgctgctgatcgtggcgatcgtgggcaacttcctttatcgtgacattatgctggcggtgcgtgcgctggccgtggttattcttattgctgctgccggtggcgtcgcgctgttgacgacgaaaggtaaggcgaccgttgcttttgctcgcgaagcgagaaccgaagttcgtaaagtgatttggccgactcgccaggaaacgctgcatactacgctgattgttgctgccgtgactgcagtaatgtcactgatcctgtggggactggatggtattctggttcgcctggtctcctttatcactggcctgaggttctgagatgtctgaagctcctaaaaagcgctggtacgtcgttcaggcgttttccggttttgaaggtcgcgtagccacgtcgctgcgtgaacatatcaaattacacaacatggaagagttatttggcgaagtcatggtcccgaccgaagaagtggttgagatccgtggcggccagcgtcgcaaaagcgaacgtaaattcttcccgggctatgtcctggttcagatggtcatgaacgacgcaagctggcacctggtgcgcagcgtaccgcgcgtgatgggcttcatcggcggcacctctgaccgtccggcgccgatcagcgacaaagaagtcgacgccatcatgaatcgtctgcagcaggttggcgataagccgcgtccgaaaacgctgtttgaaccgggtgaaatggttcgcgttaacgacggtccgttcgctgactttaacggcgtggtggaagaagtggactatgagaagtcccgcctgaaagtttccgtttctatcttcggtcgtgcgaccccggtagaactggacttcagccaggttgagaaggcgtaagccggcgatcaaaaaagcagcgatttaatcgttgcatagggcgcgaaattggcatacaatttcgcgccttttgtttttatgggcccggcccgtaaaacgatgtttaatcacggggagcttctctgaagcgttaatacccattttgaggatttaagaatggctaagaaagtccaagcctacgtcaagctgcaggttgcagctggtatggcgaacccgagcccgccggtcggcccagcactgggtcagcagggcgtgaacatcatggaattctgcaaagcgttcaacgccaaaactgattccctggagaaaggtctgccgatcccggttgttatcaccgtttacgctgaccgttcctttacctttgttaccaagactccgccggctgctgttctgctgaagaaagctgcaggcatcaagtctggttccggtaagccgaacaaagataaagtgggtaaaatctcccgcgctcagctgcaggaaatcgcgcagaccaaagctgccgacatgactggtgccgacattgaagcgatgactcgctccatcgaaggtactgcacgttccatgggcctggtagtggaggactaagaaatggctaaactgaccaagcgcatgcgcgtgatccgtgagaaagttgatgcaactaaacagtacgacatcaacgaagccattgctctgctgaaagagctggccaccgctaaatttaccgaaagcgtagacgttgccgttaacctcggcatcgacgctcgtaaatctgaccagaacgtccgtggcgcaactgtactgccgcacggtactggccgttccgttcgcgtagccgtatttacccagggcgcaaacgctgaagctgctaaagctgcaggcgctgagctggtaggtatggaagatctggctgagcagatcaaaaaaggcgaaatgaactttgacgttgttattgcttccccggatgcaatgcgcgttgttggccagctgggccaggttctgggtccgcgtggcctgatgccgaacccgaaagtaggtaccgtaactccgaacgttgctgaagcggttaaaaacgcgaaagcaggccaggttcgttaccgtaacgacaaaaacggcatcatccacaccaccatcggtaaagtggactttgacgctgacaaactgaaagaaaacctggaagctctgctggttgcgctgaaaaaagcaaaaccgactcaggcgaaaggcgtgtacatcaagaaagttagcatctccaccactatgggtgcaggtgttgcagtagatcaggctggcctgaacgcttctgcaaactaatgcctttacgtgggcggtgattttgtctacaatcttacccccacgattctgtcaataagacagacgctatgcgagtcatttgaattgcagctaacgccgctgcggttcgaaggacgaagtcataggaagaatttgttcgttggagcctggcctatccaggcctccgtcgaagaccgcaggtgtttcgcaagaaacttaatcccctgcgtagacggtgacagaacgctaagattatttttggatattctggcttgtttctgctcaccgtatttagacgctcttttcgttgaattgagtgaagtgagttccagagcataggctctggcaaacatccaggagcaaagctaatggctttaaatcttcaagacaaacaagcgattgttgctgaagtcagcgaagtagccaaaggcgcgctgtctgcagtagttgcggattcccgtggcgtaactgtagataaaatgactgaactgcgtaaagcaggtcgtgaagctggcgtatacatgcgtgttgttcgtaacaccctgctgcgccgcgtcgttgaaggtactcagttcgagtgcctgaaagacacgtttgttggtccgaccctgattgcatactctatggaacacccgggcgctgctgctcgtctgttcaaagagttcgcgaaagcgaatgcaaaatttgaggtcaaagccgctgcctttgaaggtgagctgatcccggcgtcgcagatcgaccgcctggcaactctgccgacctacgaagaagcaattgcacgcctgatggcaaccatgaaagaagcttcggctggcaaactggttcgtactctggctgctgtacgcgatgcgaaagaagctgcttaatcgcagttatctttgtaaagcattcgcttacgtataaacttattctgatattcaggaacaatttaaatgtctatcactaaagatcaaatcattgaagcagtatccgctatgtccgtaatggacgttgttgagctgatctctgcaatggaagaaaaattcggtgtttccgctgctgctgctgtagctgtagctgctggcccggttgaagctgctgaagaaaaaactgaattcgacgtaattctgaaagctgctggcgctaacaaagttgctgttatcaaagcagtacgtggcgcaactggcctgggtctgaaagaagctaaagacctggtagaatctgctccggctgcactgaaagaaggcatcagcaaagacgacgctgaagctctgaaaaaatctctggaagaagctggcgctgaagttgaagttaaataagccaacccttccggttgcagcctgagaaatcaggctgaggctggtgactttttggtcaccagcctttttgcgctgtaaggcgccagtagcgtttcacgctgtttgactactggtttgcctctcaatgcttgtttctatcgacgacttaatatactgcgacaggttagggttcctgggctgtgtaaatcgcaatgaaatggtttaagcgtgatagcaacaggcattgcggaaagtgttccattttccggtcaacaaaatagtgttgcataaaaaactgccctctgcgggcagatgggtcgacttgtcagcgagctgaggaaccctatggtttactcctataccgagaaaaaacgtattcgtaaggattttggtaaacgtccacaagttctggatgtgccatatctcctttctatccagcttgactcgttccagaagtttatcgagcaagatcctgaagggcagtatggtctggaagctgctttccgttccgtattcccgattcagagctacagcggtaattccgagctgcaatacgtcagctaccgtctgggcgaaccggtttttgacgttaaagaatgtcagatccgtggcgtgacttattctgcaccgctgcgcgtaaaactgcgtctggtgatctacgagcgcgaagcgccagaaggcaccgtcaaagacattaaagaacaagaagtctacatgggcgaaattccgctcatgaccgacaacggtacctttgttatcaacggtaccgagcgtgttatcgtttctcagctgcaccgtagcccgggcgtcttctttgacagtgacaaaggtaagacccactcctccggtaaggttctgtataacgcacgtatcatcccttaccgcggttcctggctggacttcgaattcgacccgaaagacaacctgttcgttcgtatcgaccgtcgtcgtaagctgccggctaccatcatcctgcgcgcgctgaattacaccactgagcagatccttgacctgttcttcgaaaaagtggtctttgaaattcgcgacaacaagctgcagatggagctgattccggagcgtctgcgcggtgaaactgcctccttcgatatcgaagccaacggcaaagtgtacgttgagaaaggccgtcgcatcacggctcgtcatatccgtcagctggaaaaagacgatatcaagcatatcgaagtgccggttgaatatatcgcgggcaaagtggcggctaaagactatatcgatgaagcgactggcgaactgatctgcccggcgaacatggagttgagcctggatctgctggctaagctgagccagtctggccacaagcgtatcgaaacgctgttcaccaacgatctggaccacggcccgtacatctctgaaacggtacgcgtcgacccgactaacgatcgtctgagcgcgctggtagaaatctaccgcatgatgcgccctggcgagccgccgactcgtgaagccgctgaaagtctgtttgagaacctgttcttctcagaagaccgctacgatctgtccgcggttggtcgtatgaagttcaaccgttctctgctgcgcgacgaaatcgaaggttccggtatcctgagcaaagacgacatcatcgaagtgatgaagaagctcatcgatatccgtaacggtaaaggcgaagtggacgatatcgaccacctcggcaaccgtcgtatccgttccgttggcgaaatggcggaaaaccagttccgcgttggcctggtacgtgtagagcgtgcggtgaaagagcgtctgtctcttggcgatctggataccctgatgcctcaggatatgatcaacgccaagccgatttccgcagcagtgaaagagttctttggttccagccagctgtctcagtttatggaccagaacaacccgctgtctgagattacgcacaaacgtcgtatctccgcactcggcccaggcggtctgacccgtgagcgcgcaggcttcgaagttcgagacgtacacccgacccactacggtcgcgtatgtccgatcgaaacgcctgaaggtccgaacatcggtctgattaactccctgtccgtgtacgcgcagaccaacgaatatggcttccttgagacgccgtatcgtaaagtgaccaacggtgtggttactgacgaaattcactacctgtctgctatcgaagaaggcaactacgttatcgctcaggcgaactccaacctggatgaaaacggccacttcgtagaagatctggttacctgccgtagcaaaggcgaatccagcttgttcagccgcgaccaggttgactacatggacgtatccacccagcaggtggtatccgtcggtgcgtccctgatcccgttcctggaacacgatgacgccaaccgtgcattgatgggtgcgaacatgcaacgtcaggcggttccgactctgcgcgctgataagccgctggttggtaccggtatggaacgtgctgttgccgttgactccggtgttactgccgtggctaaacgtggcggtaccgttcagtacgtggatgcttcccgtatcgttatcaaagttaacgaagacgagatgtacccgggcgaagcaggtatcgacatctataacctgaccaagtacacccgttctaaccagaacacctgcatcaaccagatgccttgcgtgtccctgggcgaacctattgagcgcggcgacgtgctggcagacggcccgtccaccgacctcggtgagctggcgctgggtcagaacatgcgtgtagcgttcatgccgtggaacggttacaacttcgaagactccatcctcgtttccgagcgtgttgtccaggaagaccgtttcaccactatccacattcaggaactggcgtgcgtgtcccgtgacaccaagctggggccggaagagatcaccgctgacatcccgaacgtgggtgaagctgcgctctccaaactggatgaatccggtatcgtttatatcggtgcggaagtgaccggcggcgacattctggttggtaaggtaacgccgaaaggtgaaacccagctgacgccggaagagaaactgctgcgcgcgatcttcggtgagaaagcgtctgacgttaaagactcttctctgcgcgtaccgaacggtgtctctggtaccgttatcgacgttcaggtctttacccgtgacggcgtagaaaaagacaaacgtgctctggaaatcgaagagatgcagctgaagcaggccaaaaaagacctgtctgaagaactgcagatccttgaagccggtctgttcagtcgtatctacgcggtgctggtctccggtggcgttgaagctgagaagctcgacaagctgcctcgcgatcgctggctggaactgggcctgaccgacgaagagaaacaaaatcagctggaacagctggctgagcagtatgacgaactgaaacacgagttcgagaaaaaactcgaagcgaaacgccgtaaaatcacccaaggcgacgatctggcaccgggcgtgctgaagattgttaaggtatatctggccgttaaacgccgtatccagcctggtgataagatggcgggtcgtcacggtaacaagggtgttatctctaagatcaacccgatcgaagatatgccgcacgatgctaacggtacgccggtagatatcgtactgaacccgctgggcgtaccgtctcgtatgaacatcggtcagatccttgaaactcacctgggtatggctgcaaaaggcatcggcgataagatcaacgccatgctgaaacagcagcaggaagtcgcgaaactgcgcgaattcatccagcgtgcttacgatctgggcgctgacgttcgccagaaagttgacctgaataccttcagcgatgaagaagttctgcgtctggctgaaaacctgcgtaaaggcatgccgatcgcaacgccggtattcgacggtgcgaaagaagctgaaatcaaagagctgctgcagctgggcgacctgccgacttccggtcagatcaccctgtttgatggccgcaccggtgaacagttcgaacgtccggtaaccgtgggttacatgtacatgctgaaactgaaccacctggtcgacgacaaaatgcacgctcgttccaccggttcttacagcctggttactcagcagccgctgggtggtaaggcacagttcggtggtcagcgcttcggtgagatggaagtgtgggcgctggaagcatacggcgcggcctacaccctgcaggaaatgctcaccgttaagtctgatgacgtgaacggtcgtaccaagatgtataaaaacatcgtggacggcaatcaccagatggaaccgggcatgccggaatccttcaacgtactgttgaaagaaattcgctcgctgggcatcaacatcgaactggaagacgagtaattctcgctcaaacaggtcactgctgccgggttaacgcccggcagcggaatgtgctaactccgacgggagcaaatccgtgaaagacttattaaagtttctgaaagcgcaaactaaaaccgaagagtttgatgcgatcaaaattgctctggcttcgccagacatgatccgttcatggtctttcggtgaagttaaaaagccggaaaccattaactaccgtacgttcaagcctgagcgtgacggccttttctgcgcccgtatctttgggccggtaaaagattatgagtgcctgtgcggtaagtacaagcgcctgaaacaccgcggtgtgatctgtgagaagtgcggcgttgaagtgacccagactaaagtgcgtcgtgagcgcatgggccacatcgagctggcatgtccgactgcgcacatctggttcctgaaatccctgccgtcccgtatcggtctgctgctggatatgccgctgcgcgatatcgaacgtgtactgtactttgaatcctatgtggttatcgaaggtggcatgaccaacctcgaacgcaaccagattctgacggaagaacagtacctggacgcgctggaagagttcggtgacgaattcgacgcgaaaatgggcgcggaagcgatccaggcgctgctgcgcaatatggatctggagcaggaatgcgagcagctgcgtgaagagctgaacgaaaccaactccgaaaccaagcgtaaaaagctgaccaagcgcattaagctgctggaagctttcgttcagtctggcaacaagccggagtggatgatcctgaccgttctgccggtactgccgccagatctgcgtccgctggttccgctggacggtggtcgtttcgcgacgtctgacctcaacgatctgtatcgtcgcgtgatcaaccgtaacaaccgtctgaaacgtctgctggatctggctgcgccggatatcatcgtacgcaacgaaaaacgtatgctgcaggaagcggttgacgccctgctggataacggtcgtcgcggtcgtgcgatcaccggttctaacaaacgtcctctgaaatctttggccgatatgatcaaaggtaaacagggtcgtttccgccagaacctgctcggtaaacgcgttgactactccggtcgttctgttatcaccgtaggtccatacctgcgtctgcatcagtgcggtctgccgaagaaaatggcgctggagctgttcaaaccgttcatctacggcaagctggaactgcgtggcctggccaccaccatcaaagccgctaagaagatggttgagcgcgaagaagctgtcgtttgggatatcctggacgaagttatccgcgaacacccggtcctgctgaaccgtgcgccaaccctgcaccgtctgggtattcaggcattcgaaccggttctgatcgaaggtaaagccatccagctgcacccgctggtttgtgcggcatacaacgccgacttcgatggtgaccagatggctgttcacgtaccgctgacgctggaagcccagctggaagcgcgtgcgctgatgatgtctaccaacaacatcctgtccccggcgaacggcgaaccaatcatcgttccgtctcaggacgttgtactgggtctgtactacatgacccgtgacagtgttaacgccaaaggcgaaggcatggtgctgactggcccgaaagaagctgagcgtatttatcgcgccggcctggcctctctgcatgcgcgcgttaaagtgcgtatcactgaatacgaaaaagacgacaatggtgagtttgtcgcgaaaaccagcctgaaagacacgaccgttggccgtgccattctgtggatgatcgtaccgaaaggtctgccgttctctatcgtgaaccaggcgcttggtaagaaagcgatctccaagatgctgaacacctgttaccgtattctgggtctgaaaccgaccgttatttttgcggaccagacgatgtacaccggctttgcttacgcagcgcgttcaggtgcatccgttggtatcgatgacatggtcatcccggagaaaaaatacgaaatcatcagcgaagcggaagcggaagttgctgagattcaggaacagttccagtccggtctggtgaccgcgggcgaacgctacaacaaagttatcgatatctgggctgcggcgaacgatcgtgtatccaaagcgatgatggataacctgcaaaccgaaaccgtgattaaccgtgacggtcaggaagagcagcaggtttccttcaacagcatctacatgatggccgactccggtgcgcgtggttctgcggcacagattcgtcagctggctggtatgcgtggtctgatggcgaagccggatggctccatcatcgaaacgccgatcaccgcgaacttccgtgaaggtctgaacgtactccagtacttcatctccacccacggtgctcgtaaaggtctggcggataccgcactgaaaacagcgaactccggttacctgactcgtcgtctggttgacgttgcgcaggacctggtcgtcactgaagacgactgcggcaccctggaaggcatcaccatgacgccggttatcgaaggtggcgacgttaaagagccgctgcgcgatcgcgtactgggtcgtgtgactgcggaagatgttctgaagccgggtaccgcggatattctggttccacgcaacacgctgctgcatgagcactggtgtgacctgctggaagcgaactccgttgactccgtcaaagtgcgttccgttgtatcctgtgacaccgactttggcgtctgcgcgcactgctatggtcgtgacctggcgcgtggccacctcatcaacaaaggtgaggctatcggcgttatcgcggcacagtccatcggtgagccgggtacacagctgacgatgcgtacgttccacatcggtggtgcggcatctcgtgcggctgctgaatccagcatccaggtgaaaaacaaaggtagcatcaagctcagcaacgcgaagtcggttgtgaactccagtggtaagctggttatcacttcccgtaataccgagctgaagctgatcgacgaattcggtcgtaccaaagagagctataaagtaccttacggtgcggttatggcgaaaggcgacggtgagcaggttgccggcggtgaaaccgtcgcaaactgggatccgcacaccatgccggttatcaccgaagttagcggtttcatccgtttcactgacatgatcgacggccagaccattactcgtcagactgacgagctgaccggtctgtcttcgctggtggttctggactctgcagaacgtaccgcaggtggtaaagatctgcgtccagcactgaaaatcgttgatgctcagggcaacgacgttctgatcccaggcactgatatgcctgctcagtacttcctgccgggtaaagcgattgttcagctggaagatggcgtacagatcagctctggtgacaccctggcgcgtattccgcaggaatccggcggtaccaaggatatcaccggtggtctgccgcgcgttgcggacctgttcgaagcacgtcgtccgaaagagccggctatcctggctgaaatcagcggtatcatttccttcggtaaagaaaccaaagggaaacgtcgcctggttatcaccccggtagacggtagcgagccgtacgaagagatgatcccgaaatggcgtcagctcaacgtgttcgaaggtgaacgtgtggaacgtggtgatgttgtttccgacggtccggaagcaccgcacgacattctgcgtctgcgtggcgtacatgctgtgacccgttacattgttaacgaagtccaggacgtataccgtctgcagggcgttaagattaacgataagcacatcgaagttatcgttcgtcagatgctgcgtaaagccaccatcgaaagcgcaggcagctccgacttcctcgaaggcgagcaggtggaatactcccgcgtcaagatcgcgaaccgcgaactggaagcgaacggcaaagtgggcgcaacgttctcccgcgatctgctgggtatcaccaaagcgtctctggccaccgagtccttcatctccgcggcatcgttccaggagaccactcgcgtgctgaccgaagcagccgttgcgggcaaacgcgacgaactgcgcggtctgaaagagaacgtcatcgtgggtcgtctgatcccggccggtaccggttatgcgtatcaccaggatcgtatgcgccgtcgcgctgctggcgagctgccggcggcaccgcaggtgagcgtggaagaagcgtctgccaacctggcagagctgctgaacgcaggtctgggcggttctgacaacgattaatcgttgatgcactgctaaaaagccggtcaggtttcctgaccggctttttttattgtctattttccgccgctttcccggcccttaattacatttacgacatattaaatcnnnnnnnnnnnnnnnnnnnnnnnnnnnnnnnnnnnnnnnnnnnnnnnnnnnnnnnnnnnnnnnnnnnnnnnnnnnnnnnnnnnnnnnnnnnnnnnnnnnnnnnnnnnnnnnnnnnnnnnnnnnncaaaatacctgatgaatcatgggattacttctgttgctgtatcttcggcgcgacggcgctggagagggatagccgcatctcatgcttctcccggtctggcgcagaaataatcccgagaggcaggtagggatcatttttagatctgagtggacaggctctgggggctgcatggaattcgcgatacaactcattattatattaatttgtctgttttatggtgcccgaaaaggggggattgcgctggggctgctgggcggcatcggtttggtgatcctcgtctttgtttttcatctccagccgggcaaaccgccggttgatgtgatgctggtgatcattgcagtggtagccgcctcggcgaccctgcaggcgtccggcgggttagacgtgatgctgcagattgccgagaagctgctgcggcgtaacccgaaatatgtttctatcgtggcgcctttcgtcacctgcacgctgaccatcctctgcggtaccggccacgtggtgtataccatcctgccgattatctacgatgtggcgattaagaataacattcgtccggagcgtccgatggccgccagctccattggcgctcagatggggatcatcgccagcccggtctcggtggcggtggtatcgctggtggcgatgctgggaaattttacctttaacgggaaacacctggagtttctcgatctgctggcgataaccattccgtccacgctgctgggtattttagccatcggtatcttcagctggttccgcggcaaagacctggatcaggacgaagccttccaggcgtttattgcgctcccggagaaccgccattacgtctatggcgatacggcgacgctgctggacaaaaagctgccgaccagcaactggatagcaatgtggatttttctggcctctatcgccgtggtggcgctgcttggcgctttttctgaactgcgcccggcctttgacggtaaaccactgtcgatggtgctggttatccagatgtttatgctgctctccggagcgctgatcatcatcattacaaaaactaacccggcatcgatttccaaaaatgaggtctttcgttcgggaatgatcgctatcgtcgcggtgtacggtatcgcgtggatggcggagaccatgtttggcgcgcacatgaccgagattaaaggcgtgcttggtgaaatggtaaaagagtatccgtgggcttatgccatcgtgctgctactggtttcgaaatttgtgaactcccaggcggcagcgctggcggcgattgtgccagtagccctggccatcggcgtcgacccggcctatatcgtggcttcagcgccggcctgctatggctactatattctgccgacctacccaagcgatctggcggcgatccagtttgatcgctcagggaccacccatatcggccgctttgtgattaaccacagctttatcctgcccgggctcatcggcgtcggcgtctcctgcgtgtttggctgggtattcgcggcgatgtacggctttctgtaagaaggacgggcgccggcagcgacgcccgttaaatccgtgagattattgcgcgaggggcagacgacgatagagttcaatcatgtcggtcgccagatcctgaatgaccatagcgttcatcagatggtcctgggaatgcacggtgatcaggttgaccggcaatttaccgctgccttcatccatgccgataagctgggtctgaattttatgcgcatgtttgacgaactcatgggattcagccatggcctgctccgcggcggcaaaatcgccttttcgcgccagctgtagcgccgtcagcgccgcgctacgtgcggaacccgcgttaaccagcagctccatgatgatcgtttctaaatcttccatcgattactccagcatcttaagggctttatccagaacggcatcacctttcatcatgccgtagtccatcatatcgatcacggcgaccttcttgccgaacgggtcggccagcgcctgcagctttgcctgctcatatttcacctgagggccgagcaaaataatgtcggcggcggccagattatctttaaactcagcgaccggtacggccttgatagagacctcaacacccttcttctgcgcggcatcttgcatacgctgaaccagcatgctggtagacataccggcggcacagcacaaaacgatattcttcatagtcagtggcccttgtgttccgtgatgtcttatctttatcgcggccctgtcgatgcgacaaccgctttaccgtgattgtgtgtaaggcatcacacaataattgaaaccggtttcattttttccggaaaaaataaaaaagcccaccgaagtgggcggtggcggcgctgaagtcttacgcgcgcaggatacggtttttaccctgctgtttggctttgtacagcgcttcatcgacgctcaccaccagcttatccagtggctccatattccattccccaagtccggcgctgaaggtgaccgtcaggccatcttcgcgccaggtgcgtcgttcgacgtttatccgccatgtttccaacagcgtgcgggcgttatcgatatgttcggcaggaaagaccaccgcgaactcttcaccgccgtagcgatagagggatatctccagcggctggaggacctgtagcccttcgcgagcgacgttacgcaggacgatatcgccattgaggtggccccaggtgtcgttgatcgatttaaagttatcgatatcgaccagcgcgagggcgaatggctggtgatcgttcatcagggcggcaatatcgctgtcgaaggcgcggcggtttttgcagccggtgagagcgtcgatggtcgcctggcggacgtaggacagttcgcgctgtttattggtttcaatcgctttactcagcatcgcctcaaggcgcggggcgcgtttgacgtcaccggttttaatcgcattgatgatattcatcagcacggtacgggaagcatgacgcagataaagaccgaacaggataataatgatcgctgcgagagtgaaaccgccgatcactaaattggtctcatgacgtgtcagattgaccagggtggcgttatcgacacggaaaatcacaaaccagtcgggattggtaaaggagtaatagtaataccaggtgtcgctcccgggatcgtaaagctgcccctctccgctggtcattttatccatcagctcgtccctgacgaagggtttaaacagcgcgcccgggtcggagtgcaggaccactttgccatcccgttgcaccacaaaaaattccccctgtacgggcgccaccatctggcgcagcgcgaaccccatggaggtgagatcgagatgaaaggccaggctgcccttgagtttcccttccggggtaatgatgggtttgaaaatggtaatcgtcggatggtgggtgaaataatccatatacggactggtgtagtggctgaaggtgctggcttccgcctgtttgataaaccagggccgcgttctgggatcgaaagcccggctgtcttcgttttccagcacctccggggcgcgcagatagtggccctcggtatccgccagcgagatggatgagacgcttggcatcatgttctgtaactgcatcagcgtggttaaccctttctccggctccacattgactgcgcgattcagttcgtcattgcgggcaaagaaggcggctgcgcgcccgaggataaaatcattttcccgcagcagggtttccgtatagttgatcgccaggttatgggtaaaattgcggttaatatcgtgataatcttcgagaaaatctttctgttgcgccagagtcacaaaaatagcgatcagcataaagctgagcaaaataccggcaaaccccacgacgatcggcgtcgtaaaagagagctttctgttgtgtagagccatgaatcgttaatcgtcccggatgtataaaccatgggtccgaacgcaggttgcgtctgggacgcctgccgatcgaatcagttcactattgctcaattataactctgaggccttcatgtatcgtgatttatattcggcgataatgtgcaggcctctgctcagcgcggagaggcagggcgaaaatgaggaagaaaaggttcgccctggtcagcgtccgctgctgacccgggcagaatagaaaaacggcgtcgggcgggccagcctccgtttttcatctctcgtgcaggcgcgcaaaattatcaggcgtttacactgtacatcatgaggtttgcgaagcgcgtcccagccagctatcccagtctttccataccggctgcaggccgcgggcggccagcgcgctggcgatctcttcagggcggcgatcgtcgtgcggggcaaattgctcgagctccggatgatcgtcggcgtagccgccgggctgggttttagagaaggcgctgacgttattgatcgccagcgggatcacccggtcgcggaaccagggtgattcgcgggtggatagcgacagctcaacctctggcgccagcaggcggaaggcgcagatagtttgcactagctggcgctcatccatcagcgaagccggttcaataccgccggcgcagggacgcaggcgcgggaaggagaccgaatagcggctgcgccagtagcgctgctgcagccacagcaggtgctcagcgactataaagcagtccactcgccagctgtcggaaaggccgatgagcgcgccaaggccgatcttatcgatccccgccgcgcctaagcgatccggcgtatccagccgccagaagaaatcctgcttttttcctttcagatggtgtttggcgtacatgctttcatgataggtctcctgatagaccatcaccccgtcgagccccagggttttcagctcggcatactcttcagtcgccagcggctgcacctccatatgcagcgaggcaaactggctgcggatagccggtaggtgctgacggaaataatccattcccaccttaccctgatgttcgccggtcaccagtagcagatgctcaaagcccaggttgcggattgcggcgcactcgcggacaatctcggcggcatccagcgtcttgcgcttaatgcggttgctcatcgagaagccgcagtaggtgcagtcgttagcgcacaggttggagagatacagcggcacgtagaagctgacggtattgccgaagcgctgccgggtgaggcgctgcgcgcgctgggccagcggttcaaggtaattggccgcggcaggcgagagcagggccatcatatcatcgcgggtgagctgtttggccgccagcgcccgttcgacgtcggcggcggttttgctgttgatgcgcaggcggatatcgtcccactccagctgccgccagcgatcgctaaaggttttcatgccagcgcctccaggaatccggtgagcgggctggtggcctgcgcctgcgtactgcgtgcccccggtccggcctgacgcgccagtaatccggcatcgatcgccatacggaaggcgcgggccatggccacggggtcgtcggcgacggcaatggcggtattgaccagcaccgcgtccgcgcccatctccagcgcctgcgccgcatggctcgggacgccgatcccggcgtcgaccaccaccgggaccgtcgcctgctcgataataatctccagcatggctttggtttccagcccctgattggagccgatcggcgcacccagcggcatcaccgccgcgcagcccacctcttccagtcgtttacacagcaccggatcggcgccgcagtagggcagcaccacgaacccttcgcggaccagcagctccgccgctttcagggtttcaatcgggtcgggcagcagccagcgggcgtccgggtggatctccagcttcagccagtgtgtacccagggcttcccgcgccagacgggcggcaaacaccgcctcttccgccgtcttggcgcccgaggtattcggcagcaggctgactcccgccgccagcagcggggcgaggatggcgtcattgcgctggcgtaaatcgacgcgcttcatcgccagggttaccagctggctgcccgaggcgcgaatcgcctcgaccatcacctccggggcggcgaatttgccggtaccggtgaaaagatgggattcaaacgttttgtctgcaatacgtaacatgtcagcctccagcgataacctgaaaaagcaggacccgatcgccttcctgcaagagatgatcttcccaccggtcgcgcggcaggatgtgttgattgagcgccagcgcaacgcccggctgctgttgttcgagctgggtcagcagggcgctgacgctgagattgtcggcgcacgccagcggctcgtcgttaaaccagatctgcatgccgccctccgcacaccgggcagctccgggaacgctgtagcgcaagggcgcgccagttgctggtgcgggcgtcgaacagccgcagggtgttgcgcggcgtcgccatgccgctgagcagcttaatcgtctccagcgcctgcagggtgcccatcatgccgaccaccgggccgacgatccccgcggtgcggcagttgcgctgcggttcatcgctttccggccacaggcagcgatagcagccctgcgtccagggcggggtgagcaccatcagctgaccgccgaagcccacggcgctggcggtcactaacggggtatcgagggccacacaggcggcattgatcgcctggcgggtgaccatattatcggtacagtccagcaccacgtccgctttcgccacttcggcgcggagcgcctcgccgcttaagcgctgctggagcgctaccagtttgatctgcgggtttagctggctgagccgggtctgtgccgctgcggcttttggccgatcgatatccgcgctggtgaacaagatctgccgttgcaggttgctgagatgcaccgcgtcgtcatcggccagggtcagcgtcccgacgccagccccggccagatagagcgccgccggggagcccagcccgccaaggccgataatcagcactcgactggctaacagcttctgctgcccttcgatggcaatatcctccagcagcagctggcggctatagcgcataaagtcgtgatcattcatcgcccgctcccgccagcgccagcagttggtcggtcgctgcccgccagtccgccgcctgggtgatggcgctgaccaccgcgatgctgccgacgccggtcgccagtacccccggcgccttttccaggcttattccgccgatcgccacggtggggtaatccgccaggcgttgaatatgtctggcaagctgctcgaggccctgcggcgcggaaggcatctgtttggtttgcgtcgggaagacgtgacctagcgcgatgtaagaggggcgtgccgcaagggcgacatcaatttccatatcatcgtgagtagagacgccaagacgcagcccggcctggcggatagcgctcagatcggtggtttccagatcttcttgtccgagatgcacgccataggcctggtgcttaatcgccagttgccagtaatcgttaatgaacagtcgggcgtgatagcggcgaccaagggcgatggcggcgatcacgtcatcctcaacttcgctgtcgcgccggtctttgatgcgtaactgaagggtacgtaccccagcttcgagcaggcgctcaatccacgccacgctgtccaccaccgggtagagtccgagacgaaacgggacgggtggaaaatcaggttgatacatcaggcttcctcctgtttcaggtagatttcgccgccgcgggcgcggaagttattcgacatatcggccatgccggcttctatactttgcttcgcggcgtagtcgcggacctcctgagtgattttcatcgaacagaatttcggcccgcacatggagcagaagtgggcgactttgccggactcctgcggcagggtttcatcgtgataggcccgcgcggtgaacgggtcgagcgcgaggttgaactggtcttcccagcggaattcaaaacgcgcttttgacattgcgttgtcgcggatctgcgccccgggatggcctttcgcgaggtcggcggcgtgggcggcgattttgtaggtaatcagcccctgtttgacatcctctttgttgggcaggccgagatgctctttcggcgtgacatagcacagcatggcgcagccgaaccagccgatcattgccgcgccgataccggaggtgaaatggtcgtagcccggcgcgatatcagtggtgagcggccccagggtgtagaatggcgcttcgtggcagtgctccagctgttcggtcatattgcggcggatcatctgcatcggcacgtggccagggccttcaatcatcacctgcacgtcatattcccaggcgattttcgtcagttcgccgagggtgcgcagctcggaaaactgcgcctcgtcgttggcatcctgaatggagccggggcgcaggccatcgcccagcgacagcgacacgtcataggcggcgcagatttcgcagatttcgcggaaatgctggtagaggaagttttcctgatgatgcgacaggcaccacttagccatgattgagccgccgcgcgagacgataccggtcaggcgcttcgccgtcatcgggacgtagcgcaacagtacgccggcgtgaatcgtgaagtagtcgacgccttgctcggcctgttccagcagggtatcgcggaagacttgccaggtgagattctcggcgatgccgttgaccttctccagcgcctggtaaatcggcacggtaccaatcggcaccgggctgttgcgcaggatccactcgcgggtttcgtggatatagcggccggtggagaggtccatcaccgtgtcggcgccccagcgggttgaccagaccagtttctcgacctcttcttcgatggaagaggtcaccgccgagttgccgatattggcattcactttcaccaggaagttgcggccgataatcatcggttcagactccgggtggttgatgttggcggggatgatggcgcgtccggcggccacttcatcgcgaacaaactcgggggtgatgttttccggaaggtgggcgccgaagccttcacctgcgtgctgctggcgcagaacctcgctgcggatacgttcgcgacccatgttttcgcgaatggcgatgaactccatctccggggtgactatcccctggcgggcgtagtgcagctgggtaacgcatttgccagcgacggcgcgtttgggcgtcagcaggccgctgaagcgcagctcatcgagaccgtcgtcggccagccgcgctctggtataggccgagctgcgttcgctgagcggcgcgcagtcgttacgcgcgtcgatccacggctggcgcagctttgccagcccctggcggacatcaatgctaatatccgggtcgccatacggcccggaggtgtcatacaccgggatcggttcgttggtttcgtaccgggggttatctttatcgccgccgacgagagttgggctgagctgaatttcacgcatcgggacgcggatatccgcttgtgagccgtgaacatagatgcggcgtgaattaggaaaagcggtacccgccagcgtatcaatgaatcgctgcgcgtgctcgcgttgttcccgacgggttagtttggtagtagacatagcgcattccagttaaaaaaggacatggcttgtcagacgacggatggagtaacagatgcgatcggccctgacggactgacgcgaacagcagtttactcttgttcccttcgcaggtattagcctgatcaggttccgcggatcccgaattaacggtctcagccttttccacgttagcctgcgcatggaaaataggcactccgacaagatgaaatccctccgcagagggataatgtacgtaaattacgcgttaacggttcacaactcaagcggtcggcgcaatattatcgcgcacgtcattgctcaggttatgggcgacagccagggcgatcagtttatcttccagcgcgaaacgcgcctccagcgactcgccgatatccgacagcgcctgctgaaattcaagatagttatcgtgatcgatggcgttttcgaggcaggtatcgtagtagtccatcatctgctgggtattggcttccagctgcgggtaaagccgggtggcggctaaaagaggggtatcgccttccatttcgccaataatgcgttcataaatactaaaatgaccggatgagaggtaatccaccagactttggcaaaagtcatccagcgccttttcgtttagccgcataaacgactctttgcccggtttcaggccaaccaggttgtagtaagccacgagcagatgcttacgcacttgtagccagcgatcgaccagttcattactaccgccaacgcgctccgtcagattttccagctggtttagcatgattgactccgctagttttgatttaaatctgctcaccaaaatgtaaatataatgttaacaacatgccagtgaagcaaaggtagtgcaatagatatggatcgtattattgaaaaattagatcgcggctggtgggttgtcagtcacgaacaaaaattatggttgcctggtggagaattaccacatggcgaagcggttaatttcgatcttgtcggccagcatgcgctgcatattggcgagtggcagggcgagtccgtgtggatggtgcgccaggatcgtcgccatgacatgggatcgttgcgccaggtgctggatcaggatccgggactcttccagctggctgggcgggggatccagctcgccgaattttatcgctcgcataaattttgcggttactgcggccacccgatgcatgccagcaaaagcgaatgggcgatgctgtgcagccactgccgcgaacgttactacccgcaaattgccccctgcattatcgtggcaatccgtcgcgacgatgcgatcctgctggcgcaacatacgcgccatcgcaacggcgtgcacaccgtgctggccggctttgtcgaggtcggcgaaacccttgagcaggcggtggctcgcgaggtgatggaggagagcggtattcgggtaaaaaatctgcgttacgtgacctctcagccatggccgttcccgcagtcgctgatgaccgcctttatggcggattacgcagatggcgagatcgtggtcgacaaaaaagagttactgaccgcggactggtatcgctatgacgacctgccgcttctgccgccgccggggacagtggcgcggcggcttatcgaagataccgtcgcgatgtgtcgggcagagttcgagtgacatgttacactgggcgtatcaacgctaaaggaatgtaaaaatgaccgaactgaagaacgatcgttacctgcgcgcgctgctgcgtcagccggttgatgtcaccccggtgtggatgatgcgccaggcgggccgctatttaccggagtacaaagccacccgtgcgcaagcgggcgactttatgtcgctgtgtaaaaatgccgagctggcctgcgaagtgacgctccagccgctgcgccgttacccgctggacgcggcgatcctcttttcggacatcctgaccatcccggacgccatggggctggggctgtactttgaagctggcgaaggtccgcgcttcacctcgccggtaaaaagtaaagccgacgtcgacaagctgccgatcccggatccggagcaggagctgggctatgtaatgaacgccgtgcgcaccattcgccgcgaactgaaaggcgaagtgccgctgatcggtttttccggtagtccatggacgctggctacgtacatggtggagggcggcagcagcaaggctttcaccgtgattaaaaagatgatgtacgccgagccgcaggcgctgcatgcgctgctggataagctggcgaagagcgtcaccctgtatctcaacgcgcagatcaaagccggcgcgcagtcggtgatgatttttgacacctggggcggggtgctgaccggccgcgactatcagcagttctccctctactacatgcataagatcgtcgatggcctgctgcgggaaaacgaaggccgccgcgtgccggtgaccctgttcaccaaaggcggtggtcagtggctggaagcgatggcggagaccggctgcgatgcgttgggtctcgactggaccaccgatattgccgatgctcgccgtcgcgtgggtaacaaagtagcgctgcagggcaatatggatccgtcgatgctctatgcgtccgccccgcgtattgaagaagaagtggcgaccattcttgccggctttggccagggggaaggccacgtctttaaccttggacacggtattcatcaggacgttgaccccgagcatgcgggcgtctttgttgaggctgtgcaccgtctgtccgcaccctatcaccagtaggagataagccctatggatttagccgcactacgtacccaacagcaacagttagccgcgtcggtagagcgtgcggatcgactggatcgcgacccgccggcgttgatcggcggcgcggacgtcgggtttgagcaggaaggggagatcacccgggctgcgatggtgctgctgacctggcctgagcttgagctggtggagtaccaggtggcgcgggtcgccacctctatgccctatattcccggctttctctcgtttcgcgaaacgcctgcgctgctggcggcgtgggagcagctttcgcaaaaaccggacctgctcttcgttgacggacacggcatttctcatccccggagattgggcgtcgccagccattttggcctgatgattgatgtgccgactatcggagtggcgaaaaaacgcctgtgcggcaaaatcggcgacctgggtgatgagcctggcgcgctggccccgctgatggataaaaatgagcaactggcctgggtctggcgcagcaaagtgcgctgcaacccgctgtttattagcaccggccacagggtaggcatggacagcgctttaatgtgggttgagcgttgcatgcgaggctaccgtctgcccgagccgacgcgctgggccgatgcggtggcgtcccgtcgtccgtcgtttgtgcgttggcaagcaaatcacagctgattcaggtacactgcgcctaatttctgacttcgagaattcatcatgttacaaaacccgattcacctgcgcctggagaagctggaaagctggcagcatgtcacttttatggcctgcctgtgcgaacgtatgtatcccaactacgcgatgttctgcaagcaaaccgagtttggcgacggcctgctttatcgtcgtatcctggacctgatctgggaaacgctgacggttaaagatgcgaaggtgaatttcgacagccagctggagaagctggaagaggcgatcccggcggcagatgatttcgacatgtacggtgtctatccggccatagacgcttgcgtggcgttgagtgaactgattcattctcgtctgagcggcgaaacgctcgagcacgcgatcgaggtgagcaagacctccatcaccaccgtggcgatgctggaaatgacccaggaaggtcgcgaaatgaccgacgaagagttgaaagcgaatccggcggtagagcaggaatgggatattcagtgggaaattttccgcctgctggccgactgtgaagagcgtgatcttgagctgataaaaggcctgcgcgcggacctgcgcgaggctggcgagagcaatattggtataaattttcagcagtgagaccagaaaacgtgatttaccgcctgaattgtagcgtctgaaggcttccattccgccccccgtctggtctacatttggagggcgaaaaaaagtggctatcggtgcgtgtatgcaggagggtgcttttttggcatttccgtcgcactcgatgcttagcaagcgataaacacattgtaaggataacttatgaacaagactcaactgattgatgtaattgcggacaaagctgacctgtccaaagcacaggctaaagctgccctggaatctaccctggctgcaattactgagtctctgaaagaaggtgatgctgttcaactggttggtttcggtaccttcaaagtgaaccaccgcgctgagcgtactggccgcaacccgcagaccggtaaagagatcaaaatcgctgcagctaacgtgccggcatttgtttctggcaaagcactgaaagacgcagttaagtaagaccgcgtggcagtgaacagttttatcgaaggggctattaagccccttttgtctgtctggcgccggcctctggcgctggcgggcatcctgttgctgactgcctgcagccacgacacgtcgctaccgccgtttaccgccagcggatatgcggacaatcagggagcgatgcgcatctggcgtaaagattctggcgatgaagtccatcttctcgccgccttcagcccgtggcgtcacggggacacttcgaccagcgaatatcgctggcagggcgatcaactggcgcttatcgaactcaatgtctatggcaaaccgccggaacatattcgcgcccgtttcgacgcgcagggcgatctgagctttatgcaacgggaagtggacgggcagaagcagcagctctccagcgaccaggtcgcgctatatcgttatcgcgccgaacagatccgccagaccagcgacgccctccgccaggggcgggtcgtcctgcggcaggggcgctggaacgctgccgcgcataccgtgctgacctgcgaagggcagacggttacgcccgacctcgatagccgggccctggcgcacattgaacgccgccagagccacgcttccgccgcagtgagcattgcctggctggaggcgccggaaggctctcaactgctgctggtcgccaatgaaaacttctgcacctggcagccgacggaaaaaagcttctaacctttaccagtggttcatgcccatatgaccgccggcgctaccgcgacagccgccatatcccattcctgcgccgcggggaacgcctgcctcagccagggcgatatcaaacttcacccgctgctgatccagcttctggcgtaagccttccatctcctgagcgacagcttcaatcttcccgctgtccggcttttgcgccgtgagcagcgccttgtactcatagcgtttggactgcagctgctggcgcagggcgctggtttgcgcatagtaatcgttatgcagcttttgcacggtagcctgctgctcctgggtcagctgactgtagccctggttgcccatcccgttattgttgccccagtggtggttggcccaggccgcgttgctggcgaaggtcagcgcggcaaaggtaacgagggcgagaggtaaggtacggttccgtttcatggcattttctcctgtgtggtttccctcggtattgcatcttccatgccagtctgaaaaagcccgtctgtgtgggcctgccgaagcctttgccgaggagagcgagtaaaaatgacccgttccgccagggtcaggcgagtcatttttactcgcttaagcgcaggcgatatgtttgagagcaggattggccgcgcggaaacatggcatgatttctgctgaaggagcctgcagatagtgaaaaagagatgacaaggactcgccgatgaagatcaaatctctctcccgggacgccgccgctggcgcgctgagctggctgctgaccggcacggttgtgctgctggtcatgctgttctccgcgatgatcgtccgcgactacggtcgcgagacgaccgctgcccgacaaaccattgaagagaaagggagcgtgctgatccgcgcgctggagtccggcacgcgcgtcgggatggggatgcgtatgcatcatgcgcagctgcaggccctgctggaagagatggcctggcaaccgggcgtcctgtggttcgcggtgaccgatgaaaacggtaaaaatatcgcccatagcgatccgcagcaggtgggtaaaacgctgtatagcccggcgcagatgcgtgcgttagcggttggcgaacaggcccgctggcgccggcttagcgaaccgcagccggcgctggagatctatcgccattttcgcccgcttaatccggcccgcggccaccatatgggaatgatgaaccgcggcaatagcgccctggctcaggccatcgtcccgcaggtgatttttatcgcctttgatagccgcgagctggatgccgcgcaggcccgcgggcagcgaaatatggccatcatgctgggtgccgccgcgctggtgatagcggcgacgatcctcgctcagttctggttccgccgctatcgtcgctcgcggaaacagctgctggaggcgatggcccgcaaggaaaagctggtggcgcttggccatctggcggcgggggtcgcgcacgagatccgcaacccgctctcgtcgattaaagggctggcgaaatattttgccgagcgcacgtcgcctggcggcgagtcgcatcagttagcccaggtgatggccaaagaggctgatcgcctgaaccgggtggtcagcgagctgctggagctggtccggcccgcccatctaaactaccagacagtcgatatcaacgcgcttatccgccactcattgcagttggtaagccaggatgcgcagagccgcgggatcgcgctgcaatttactccgcgacctgagttaaccacgatcagcgccgaccccgatcgcctgaatcaggtgctgttgaatctgtatctgaatgcaatgcaggcgattggccgtgacggcgtcattcgcgtaacagcaagcgaagccgatcgtcagcgggtgaaaatcgtcgtcacggatagcggtaaggggatgagcgatgaagagttacaggctatcttcacgccgtatttcaccaccaaggcggacggcaccgggctggggctggccgtagtgcagaatattatcgaacaacatggcgggacgatccgcgccgaaagtcagccgggagctggagcgatatttacgctttggttaccggtggatgctcaacggagggaagatgagcagcgataaagtacagattctggtcgttgatgatgacatcagccactgcacgatcctgcaggcgctgctgcgcggctggggctatcaggtggggttggctcacaacggcctgcaggcgctggagcagatccatcagcaggtcttcgacctggtgctgtgcgatatccgtatggcggagatggacggtatcgcaacgttaaaagagattaaggcctataacccggcgataccggtgctgatcatgacggcgttttccagcgtcggtacggcggtagaagctattaagtccggggcgctggattatctggttaaaccgctggattttgacaccctgcagcagacgctggttcaggcattggcgcacacccggcagagcgagagcgaccccagcgttgcgacggattcacggtggggcatgattggcgacagcccggcgatgcaggcgcttcttaacgatattacgctggtggccccttcggacgcgacggtgctgatttatggggagtcgggaaccggtaaggagctggtggcgcacgccatccacgcctgcagcgagcgtcgtgacaagccgttggtcacgctcaactgcgcggcgctgaatgagtcactgctggagtcggaactcttcggccatgaaaaaggggcgtttaccggggcggatcggcgacgggaaggacgctttgtcgaggcggatggcggcacgctgttccttgatgaaattggcgatatctcgccgctgatgcaggtgcgtctgctgcgggcgattcaggaacgcgaagtgcagcgcgtgggcagtaatcagacgctttctgtcgatgtgcggctaatcgccgccacccatcgtaatctggcggaggaggtgagcgccgggcgttttcgccaggatctctattaccgcctgaatgtcgtaactattgatatgccgccgctgcgccggcgacgggaagatattccgcagctggcgcagcattttctcaaacgctataccgaacgcaatcgtaagacggtaaaggggttcacgccacaggcgatggacctgctgatccactacccctggccgggcaatattcgcgagctggaaaacgcggtggagcgggcggtggtgctactgaccggaaactatatctctgagcgagaactgcccctggcgatcgccggtacgccgctgccatcaggcgggagcgaggaggggggaattcagccgttagtggaagtggagaaagaggtgattctggcggcgctggaaaaaacgggcggcaacaaaactgaagccgcccgtcagttaggcattacgcgcaaaacgctgctggcgaaacttagccgttagccttttcacgttcgatggcgcgccagccgatatcgctacggctaaagctaccgtcccagcgaatgtcggtcagcagctgataggcgcgctgctgcgcctgcgctacggagtcacccagcgcggtgacgcacagcacgcgcccgccgttggtgaccacgcgctggtcgtcagacagtttggtgccggcgtggaagaccttaccgtctgcgacttcctgctgcggcaggccgtagatctcatcgcccgtattgtagctgcccggatagccgccggcggcaaccaccacgcccagcgacgcgcggtcatcccactcggaggttttctcgtccagcttgcccgcgcaggcggcgaggcacagctcgaccaggtcggacttcatgcgcagcatgatcggttgggtttccgggtcgccaaagcggcagttgaactcaatcaccttcgggttgccctgcttgtcgatcatcagaccggcgtagaggaaaccggtataggtgttgccttcagcggccatgcctttcacggttggccagataatccgctccatggtgcgctggtggacttcctcagtaaccaccggcgccggggagtacgcccccatcccgccggtgttcgggccggtatcgccgttgccgacgcgcttgtgatcctggctggtggccatcggcaggacgtgctcgccgtcgaccatcacaataaagctagcctcttcgccatcgaggaactcttcaatcacgatgcggtggcctgcgtcgccaaaggcgttgccggccaacatatctttgaccgccgcttcggcttcctcgagggtcatcgccacgataacgcctttacccgccgccagaccgtcggctttgatgacgatcggcgcgcctttctcgcgcagataagccagcgcaggctccacttcggtgaagttctggtattccgccgtcggaatatgatgacgggcgagaaaatctttggtgaaggcttttgagccttccagctgcgcggcgccttcggttggcccgaagatgttcagcccggcggcacggaacgcgtcgaccacgccaatgaccaacggcgcttccgggccaacgatggtcagatcgatgttctcatcctgcgcgaagcgaagcagcgccggaatatcggtgacgccgatggcgacgttttgcagcgacggctccagagcggtaccggcgttgcccggcgcgacgtagacggtatcaaccagcggcgactgagccgctttccaggccagcgcgtgctcgcgcccgccgttgccgattactaatactttcatctgctgctccatgaattaatggcggaagtggcgcatgtcggtgaagatcatggcgatgccgtgttcgtcagcggcggcaatcacttcgtcgtcacggatagagccgcccggctgaataacgcaggtgatgcctaccgcggctgcggcatcgatgccgtcgcggaatgggaagaaagcgtcagaggccatggcggaacctttcacttccagaccttcatcaccggctttaattccggcgattttcgccgagtagacgcggctcatctgaccggcgcctatgccgatggtcatattatctttggcatacacaatggcgttggatttgacgaatttcgccactttccagcagaacagcgcatcgcgcagttcctgctcggttggctgacgtttgctgaccacgcgcagttcacctgcggtgaccatgccgagatcgcggtcctgaaccagcagaccaccgttaacgcgtttgaaatcgaggccggcaacgcgagtatcccactggccgcaggtcagtacgcggacgttctgcttcgcggcggtgattttcagcgcttcttcgctggcggacggcgcgatgatcacttcgacgaactggcgagagatgatcgcctgcgcggtttcagcatccagctcgcggttaaaggcaatgatgccgccgaacgcggaggtcgggtcggttttgtaagcgcgatcgtaggcgtcaagaatcgagttgctgacggcaacgccgcacgggttggcgtgcttaacgataacgcaggccggctcgttgaactcttttacacactccagcgccgcatcggtatcggcaatgttgttataggagagcgctttgccctgcagctgagtggcggtcgccacggaggcctcttttacattctcttctatatagaaagccgcctgctggtggctgttttcgccgtagcgcatatcctgcttcttaatgaagttcagattcagggtacgcgggaagcggccagcggcttctttgctttcgccgtgataggccggaaccatgctgccgaagtagttggcgatcatgctgtcgtaagcggcggtgtgttcgaaggctttaatggcgaggtcgaagcgggtggccagcgtgagggaaccttcgttggcgtccatctcattaatgatggcgtcgtagtcgctgctctttactacgatggcgacatctttatggttcttcgccgcagagcgcaccatagtcgggccgccgatatcgatgttttccaccgcgtcttccagcgagcacccttcacgagcgacggtctgggcgaacgggtaaaggttcacgacaaccatatcgataggcgcgataccgtgttgctgcatgataccgtcatcctgaccgcgacgaccgaggatgccgccgtgtactttcggatgcagggtcttcacgcgtccatccatcatttccgggaaaccggtgtagtcagagacttcggtaaccggcaggcctttatctgccagcaggcgagcggtgccgccggtggacagcagctcgacaccacgagcggaaagcgcctgcgcgaattcgacgataccggccttgtcagaaacactgagcagagcgcggcggactggacgacgttgttgcatggtattaaatccccaggatttgaacattacagagagcgttaggtgagtttttgcctaaaaactcacctaacgcacccaaccgggcatccgtgtcatagcgcggcattgtaacgaaaacgtttgcgcaacgctcgcgaatttttatgtttctctccaggccggtgattctccttctatatagctggcgatccacggggctagcggtcatgtttttacgctctcctgtggataattctgtgtgtaacgaggtataaagcggggttttgctggggaatgcagcagtcagtcatttttctgccatttttctattgcggacgctcgagaactccctataatgcgcctccatcgacacggcggatgtgaatcacttcacacaaacagccggttcggttgcagagaaaaatcctgaaaaacgggttgactctgaaagaggaaagcgtaatatacgccacctcgcgacagagcgctaaagcgcgtcgcaactgctctttaacaatttatcagacaatctgtgtgggcactcaaagtgacatggattcttaacgtcctcggacgaaaaatgaataccaagtctcaagagtgaacacgtaattcattacgaagtttaattctttgagcatcaaacttaaattgaagagtttgatcatggctcagattgaacgctggcggcaggcctaacacatgcaagtcgagcggtagcacagagagcttgctctcgggtgacgagcggcggacgggtgagtaatgtctgggaaactgcctgatggagggggataactactggaaacggtagctaataccgcataatgtcgcaagaccaaagtgggggaccttcgggcctcatgccatcagatgtgcccagatgggattagctagtaggtggggtaacggctcacctaggcgacgatccctagctggtctgagaggatgaccagccacactggaactgagacacggtccagactcctacgggaggcagcagtggggaatattgcacaatgggcgcaagcctgatgcagccatgccgcgtgtgtgaagaaggccttcgggttgtaaagcactttcagcggggaggaaggcggtgaggttaataacctcatcgattgacgttacccgcagaagaagcaccggctaactccgtgccagcagccgcggtaatacggagggtgcaagcgttaatcggaattactgggcgtaaagcgcacgcaggcggtctgtcaagtcggatgtgaaatccccgggctcaacctgggaactgcattcgaaactggcaggctagagtcttgtagaggggggtagaattccaggtgtagcggtgaaatgcgtagagatctggaggaataccggtggcgaaggcggcccctggacaaagactgacgctcaggtgcgaaagcgtggggagcaaacaggattagataccctggtagtccacgccgtaaacgatgtcgatttggaggttgtgcccttgaggcgtggcttccggagctaacgcgttaaatcgaccgcctggggagtacggccgcaaggttaaaactcaaatgaattgacggggcccgcacaagcggtggagcatgtggtttaattcgatgcaacgcgaagaaccttacctggtcttgacatccacagaactttccagagatggattggtgccttcgggaactgtgagacaggtgctgcatggctgtcgtcagctcgtgttgtgaaatgttgggttaagtcccgcaacgagcgcaacccttatcctttgttgccagcggtccggccgggaactcaaaggagactgccagtgataaactggaggaaggtggggatgacgtcaagtcatcatggcccttacgaccagggctacacacgtgctacaatggcatatacaaagagaagcgacctcgcgagagcaagcggacctcataaagtatgtcgtagtccggattggagtctgcaactcgactccatgaagtcggaatcgctagtaatcgtagatcagaatgctacggtgaatacgttcccgggccttgtacacaccgcccgtcacaccatgggagtgggttgcaaaagaagtaggtagcttaaccttcgggagggcgcttaccactttgtgattcatgactggggtgaagtcgtaacaaggtaaccgtaggggaacctgcggttggatcacctccttaccttaaagaacctgcctttgtagtgctcacacagattgtctgatgaacgtaaagaagcaaggcgtcttgcgattgagacttcagtgtccccttcgtctagaggcccaggacaccgccctttcacggcggtaacaggggttcgaatcccctaggggacgccacttgctggttcgtgagtgaaagacgcgtgccgatgtatctcaaaactcatcttcgggtgatgtttgagatatttgctctttaaaaatctggatcaagctgaaaattgaaacgacacacagttaatgtgtgttcgagtctctcaaattttcgcaatcagaagtgaaacatcttcgggttgtgaggttaagcgactaagcgtacacggtggatgccctggcagtcagaggcgatgaaggacgtgctaatctgcgaaaagcgtcggtaaggtgatatgaaccgttataaccggcgatgtccgaatggggaaacccagtgcaattcgttgcactatcgttaactgaatacataggttaacgaggcgaaccgggggaactgaaacatctaagtaccccgaggaaaagaaatcaaccgagattcccccagtagcggcgagcgaacggggagcagcccagagtctgaatcagcttgtgtgttagtggaacggtctggaaagtccgacggtacagggtgatagtcccgtacaccaaaatgcacaggctgtgaactcgaagagtagggcgggacacgtggtatcctgtctgaatannnnggaccatcctccaaggctaaatactcctgactgaccgatagtgaaccagtaccgtgagggaaaggcgaaaagaaccccggcgaggggagtgaaaaagaacctgaaaccgtgtacgtacaagcagtgggagcaccttcgggtgtgactgcgtaccttttgtataatgggtcagcgacttatattctgtagcaaggttaaccgtataggggagccgcagggaaaccgagtcttaactgggcgttaagttgcagggtatagacccgaaacccggtgatctagccatgggcaggttgaaggttgggtaacactaactggaggaccgaaccgactaatgttgaaaaattagcggatgacttgtggctgggggtgaaaggccaatcaaaccgggagatagctggttctccccgaaagctatttaggtagcgcctcgtgaactcatcttcgggggtagagcactgtttcggctagggggtcatcccgacttaccaacccgatgcaaactacgaataccgaagaatgttatcacgggagacacacggcgggtgctaacgtccgtcgtgaagagggaaacaacccagaccgccagctaaggtcccaaagtcatggttaagtgggaaacgatgtgggaaggcacagacagccaggatgttggcttagaagcagccatcatttaaagaaagcgtaatagctcactggtcgagtcggcctgcgcggaagatgtaacggggctaaaccatgcaccgaagctgcggcagcgacactatgtgttgttgggtaggggagcgttctgtaagcctgcgaaggtgacctgtgagggttgctggaggtatcagaagtgcgaatgctgacataagtaacgataaagcgggtgaaaagcccgctcgccggaagaccaagggttcctgtccaacgttaatcggggcagggtgagtcgacccctaaggcgaggccgaaaggcgtagtcgatgggaaacaggttaatattcctgtacttggtgttactgcgaaggggggacggagaaggctatgttagccgggcgacggttgtcccggtttaagcatgtaggctggttgtccaggcaaatccggataatcaaggctgaggtgtgatgacgaggcactacggtgctgaagtaacaaatgccctgcttccaggaaaagcctctaagcatcaggtaacatcaaatcgtaccccaaaccgacacaggtggtcaggtagagaataccaaggcgcttgagagaactcgggtgaaggaactaggcaaaatggtgccgtaacttcgggagaaggcacgctggtgtgtaggtgaagcccctgcgggtggagctgagaccagtcgaagataccagctggctgcaactgtttattaaaaacacagcactgtgcaaacacgaaagtggacgtatacggtgtgacgcctgcccggtgccggaaggttaattgatggggttatccgtaaggagaagctcttgatcgaagccccggtaaacggcggccgtaactataacggtcctaaggtagcgaaattccttgtcgggtaagttccgacctgcacgaatggcgtaatgatggccaggctgtctccacccgagactcagtgaaattgaactcgctgtgaagatgcagtgtacccgcggcaagacggaaagaccccgtgaacctttactatagcttgacactgaacattgagccttgatgtgtaggataggtgggaggctttgaagcgtggacgccagtctgcgtggagccaaccttgaaataccaccctttaatgtttgatgttctaacgttggcccctgaccggggttgcggacagtgtctggtgggtagtttgactggggcggtctcctcccaaagcgtaacggaggagcacgaaggttagctaatcctggtcggacatcaggaggttagtgcaatggcataagctagcttgactgcgagcgtgacggcgcgagcaggtgcgaaagcaggtcatagtgatccggtggttctgaatggaagggccatcgctcaacggataaaaggtactccggggataacaggctgataccgcccaagagttcatatcgacggcggtgtttggcacctcgatgtcggctcatcacatcctggggctgaagtaggtcccaagggtatggctgttcgccatttaaagtggtacgcgagctgggtttagaacgtcgtgagacagttcggtccctatctgccgtgggcgctggagaattgaggggggctgctcctagtacgagaggaccggagtggacgcatcactggtgttcgggttgtcatgccaatggcactgcccggtagctaaatgcggaagagataagtgctgaaagcatctaagcacgaaacttgccccgagatgagttctccctgagactttaagtctcctgaaggaacgttgaagacgacgacgttgataggccgggtgtgtaagcgcagcgatgcgttgagctaaccggtactaatgaaccgtgaggcttaaccttacaacgccgaagatgttttggcgatttgagagaattttcagctctgatacagattaatcgatacgttggtgaaacgtgttgataaaacagaatttgcctggcggcactagcgcggtggtcccacctgaccccatgccgaactcagaagtgaaacgccgtagcgccgatggtagtgtggggtctccccatgtgagagtagggaactgccaggcatcaaataaagcagaaagcccggtcgaaagaccgggctttttgtttttgcgtttaaaaagaaccccgtcccgaaaggtgcgggtttttttgctgtgtggggtatatctcccccggtggcgctgcgcttaccggggctacggatcctcggccacctgctggccgaggggacatcaatgccgcaaagttaccgacgtcaatcgtagtctgcttcagcctgctgctcatacatcaaattcaataacggatacggttgccccagatcgtccgtttcagagcgccctgtcaccctaaaacccatcttctgataaaacccgaccgcttgttcattctgctcatttacattggtcgtcagcttcggcgttaacgacagcgcatgctcaatcagcaacttccccacgccacagccgcggacatccggatcgacgaacagcgcatccatatgatctccggtcagcagcataaaggcgatcggctggtcttccgtattaaccgccacccacagcggagcctccggtaaaaatgcgcgtaccatctcctccaactcctttcgatacgcttttgtcagaaaatcatgcgtggcgtcgaccgaccgacaccagatcgcagtcagtttatccccttcatcaggccgggaacggcggatgttaataaccatactttctccttttctacattcttatattctaactcaacaagcgccgtgaaattttctcaccgtgtacatgcagactcgacattcacccgattcctggttatcttcagctatctggatgtctaaacgtttatacgtatgctatgaggtaatacagttatgccaattcgggtgcaggacgagctgccagccgtcaatttcttgcgcaatgaaaacgtcttcgtaatgacgacaacacgtgcaacgactcaggaaatccgccccctgaaggtgttaatcctcaacctgatgccgaagaaaatcgagacggaaaatcagttcctgcgtctgctatcaaactctccgctgcaggtggatatccagttattacgtatcgatgcgcgcgagtcgcgtaatacccctgcggagcatctgaataacttttactgtaatttcgatgagatctgcgatcagaactttgacggcctgattgttaccggcgctcctttaggcctggttgagtttaacgatgttgcttactggccgcagatcaaacaggtgctggagtgggccaaggatcacgtcacttcgacgctgttcgtctgttgggcggttcaggccgcgctgaacattctgtacggcattcccaagcagacccgcgccgaaaagatttccggcgtctatgaacaccatattcttcatccgcacgccttactgacccgcggtttcgacgactctttcctggccccgcactcacgctatgctgattttccggccggacttattcgcgactataccgatcttgagatcctcgcggagacggaagagggcgatgcgtatttgttcgccagcaaagataagcgcatcgcctttgtcaccggccacccggagtacgatgccaataccctggcaagtgaatatttccgcgatgtggaagccggtttgaaccctgagatacctcataactatttcccacaaaacgacccgcagaacaaaccgcgcgccacctggcgcagccacggcaatctgctgttcgctaactggcttaactattacgtctaccagattacgccatacgatctgcgtcatatgaatccgacgctggaataatactctatgtgagacgatcctaaagcgtttcagcattttgcctctggcaccttcgggtgccttttttatttccgaaattcacttcatacgcgaggataactttaatttcattgttatcaatgtgttaatgataaattaaaattaaaatggaaattgtttttgattttggaaattaattgagtagtcttaattgtgctgagcgaaaactgcacaacgatctttcgctcgcttccagcggatcaaccaagaggagcagcacaatgacgcagcaggcgacaatcaccgatgaactggcctttagtcagccctatggcgagcaggagaagcagatcttaacgcctgaggcggtagaatttctgacggaactggtgagccgctttacgccggcgcgcaataagctgctggccgcgcgtttgcagcaacagcaggctattgacgacgggcagcttccggattttatttcggaaactgcttccattagaaatggcgactggactattcgcggtatcccggctgatttgcaggatcgccgcgtggaaatcaccggccccgtcgagcgcaagatggtcattaacgcgctgaatgccaacgtcaaagtctttatggcggactttgaggattcgctggcgcctgactggcgcaaagtcattgatggtcaaatcaacctgcgcgatgccgtgaacggaaccatcagctacaccaacgaggccggcaaaatctatcagttgcagcccaatcccgctgtgctggtatgccgtgtgcgcggcctgcatctgccggaaaagcatgtgacctggcgtcatgaggccatccccgggagcctgttcgattttgcgctctatttctttcataactaccaggcgctgctggcgaaaggaagtggtccctacttctatctgccaaaaacacaggcctggcaggaggcggcatggtggaacgatgtcttcagttttacggaagatcgctttgacctgccgcggggcaccatcaaggccacgctgctgattgagacgctgccagcggtgttccagatggatgagatcctgcatgcgctgcgcgaccatattgttggcctgaactgcggccgctgggattacatcttcagctatatcaagacgctgaaaaaccatccggatcgcgtactgccggaccggcaggtggtgacgatggataaacccttcctcagcgcctactcacgcttgttgattaagacctgccataaacgcggcgcgtttgcgatgggcggtatggcggcgtttatcccgagcaaagataccgaacgtaaccgccaggtgctgagtaaagtcaccgccgataaagagctggaggccaacaacggtcacgatgggacctggatcgcccacccgggcctggcggataccgccatggcggtgtttgaccgcgtgctgggcgataagccgaatcagctctcggtcacccggagcgaggatgcgccaattaccgctgaacaactgctggctccctgcgagggcgaacgcacggaagccggaatgcgcgccaacattcgcgtggcggtgcagtacatcgaagcgtggatctccggcaacggctgcgtaccgatttatggcctgatggaagacgccgcaacggccgagatctcgcgcacctctatctggcagtggatccatcatcagaaaaccctgaacgacggcaccccggtcactaaggcgctgtttcgccagtggctggcggaagagctgatggtgattcaggaggagctgggagagcaccgcttcagccacggccgctttgacgatgcggcgcgactgatggagcagatcaccacctccgacgagctaattgattttctgacattgccgggctaccgcctgctggcctaatcgccagatggtgtggttcgccatttagtccttcacctatgagcctggggagccaggaaattatatggagcatctgcacatgaaaacccgtacccaacaaatcgaagaattaaacaaagaatggacgaacccgcgctgggaaggcattacccgtccctacagcgcggaagaggtggtgaagttacgcggctcggtgaatccggaatgcacgctggcgcagcttggcgcggcgaaactgtggcgtctgctgcacggggaggcgaaaaaagggtacgtcaacagtctcggcgcgctgaccggcggccaggccttgcagcaggcgaaggcgggtatcgaagccatttatctctccggctggcaggtggcggcggatgctaacctggcgtccagcatgtatccggatcaatcgctgtatccggccaactcggtaccggcggtggtggatcggatcaacaacaccttccgccgcgccgatcagatccagtggtcagcgggaattgaaccgaacgatccgcgctttatcgactacttcctgccgatcgtggcggatgcggaggccggttttggcggcgtcctgaacgcctttgagctgatgaaatcgatgattgaagccggtgcagcggctgttcacttcgaagatcagctggcatcggtgaagaagtgcggccatatgggcggtaaagtgctggttccgactcaggaggcgattcagaagctggtggcggcgcgtctggcggccgacgtgatgggggtcccgacgctggtcatcgcccgcaccgatgccgacgccgcggatttaattacctcagactgcgatccgtacgatcgtgagtttattaccggggatcgcaccagcgaagggttcttccgcacccacgccgggatcgagcaggcgatcagccgcgggctggcctacgcgccgtatgcggatctggtgtggtgtgaaacgtcgaaaccggatctcgagcaggcgcgccgctttgccgaggctatccatgcgcgtttcccgggcaaactgctggcctataactgctcgccgtcgtttaactggaagaaaaatctcgatgataaaaccatcgccagcttccagcagcagctgtcggacatgggatacaaataccagtttattaccctcgcggggatccacagcatgtggttcaacatgttcgacctcgcccatgcctacgctcagggtgaggggatgcgccactatgttgagaaagtgcagcagccggaattcgccgccggtccggaaggctacaccttcgtctcgcatcagcaggaggtgggcaccggctacttcgacaaggtcaccaccattatccagggtggcacctcgtcggtaacggcgctgaccggctcgaccgaagaagatcagttttaagccatgcccggtggcgcgacgctgaccgggcctgcaagaggacgcaggccggataagcgagcgcgccatccggcatgacgtggcgccggatgggggaaagcgatgacgcgtggtctggaattactgattgcccaaacgatattgcagggatttgacgcgcagtatgggcgttttcttgaagtcacttccggcgcgcagcagcgctttgaacaggctgactggcacgccgtgcagcaggcgatgaagcagcggatccatctctacgatcaccacgtgggcctggtagtagagcagctgcgctgcatcaccgaagggaaaagcaccgacgtcgattttcttctgcgggtgaaacagcagtacacccaacttttaccggattaccctcgctttgaaattgctgagagctttttcaattcggtctactgccgcctgtttgaccaccgctcgctgacccccgagcggctctttattttcagctcgcagcccgagcgaccctttcgtaccctcccgcgaccgctggcgaaagatttctttccggaacgcggttggtcgcacctgctgggtaaagtactgtccgatctgccgctgcggctaccgtggcaaaacaaagcgcgggatatcggctatatcattgccagtctgcaggaggcgctgggggaggaactgctcgccacctgtcatctgcaggtcgccaatgagctgttctaccgcaataaagccgcctggctggtgggcaaactggtcatgccgatggcgacgctgccttttttgctgccgatccaccgcagcgaagagggtgagctgtttgttgacacctgcctcacaacccatgccgaagcgagtatcgtttttggcttcgcgcgttcctattttatggtttatgcgccgttgcccggcgccctggtggaatggctgcgcgagatcttgccgggtaaaacgacggccgagctgtacatggcgattggctgtcagaagcacgccaaaaccgaaagctatcgcgaatatctacactacattactcgctgcgatgagcagtttattgaagcgccgggtattcgcgggatggtgatgctggtgtttaccctgccgggctttgaccgggtgtttaaggtgatcaaggaccgcttcgcgccgcagaaagagatgaccgccgcccatgtgcgggcttgctatcagctggtaaaggagcatgaccgcgtcgggcggatggcggacacccaggagtttgaaaatttcgtgctggataaacggcaaatcgcgccggcgctgctggcgctgctgcaggcggaagcggggaacaaactcaccgatctcggcgaccgcatcgtcatcagccatctctatattgaacggcgaatggtgccgctcaacctgtggctggagcaggttaacggccaggcattgcgtgatgcggtagaagagtatggcaatgctatccgccagctggccgccgccaacatctttcccggcgatatgttatttaaaaacttcggcgtcacccgccatggccgggtggtgttctacgactatgatgaaatctgctatatgacggaagtgaattttcgcgagatcccgccgccgcgctatccggaggatgagctggccagcgagccgtggtacagcgtttcgcctggcgatgtgtttccggaggagttccgccactggctgtgcgccgacccgcgcattgggccactgtttgaagagatgcatgccgacctgctgcgcgccgactactggcgcgcactgcagatgcggattaaaaacggccatgtggaagatgtctacgcctaccggcgcaagcagcgttttagcgtgcgctatggcgccgacagtaggccggataaggcgtttacgccgccatccggcaaggtgcgccgatctgcctgatggcgctacgcttatcaggcctacttaaaatgcccctctggggcatttttttatttaaccccgccatacgccagcgtcacttccttcgccgccttgatcaccagcgcgcccagctcagtcacccgatcatcggtcatacgcgagatggggcctgagatggagattgccgcgaacggttcgcgatgttcatcgtaaatgcaggcggcgacgcagcgcaggccgagcgcgtgctcctcatcatcgaaagagtagccccgcttgcgggtctgggctaaatcttccttcagatgcagcggggagaccagcgtggcatgcgtataggcatgcagccctttacgatgcagcagactggtgacctgctcttcgctcagctgcgcgagaaacgccttcccggcgccggaagcgtgcatcggcagtttaccgccgattggcgccgacatccgcatcagctgggtgcactgcacctgatcgataatgatcgcctggtggtcgctctggtcgagcaccgctaaattcaccgtttcaccggaatcttccatcagctggcgcaggatcgggtggacaatggccagcagattgcggctttgtagaaagctgctgccgaccacgaaagcatgcgcccctacggcccagtgacccagctcgccaacctggcggacgaagcccagctgttgcatggtggtcagcagacggtgagtcgtggagttgggcagacccgcctgctgcgccagttcggtcagcgcgacgctgctgtgggactcggcaatccattcgagtaatttcaggccgcgggtcagcgactgaacctgaccgccagcctgctgggcagtggcagccgcgggttttctgccgcgtttcgcgggaatgggggtagtggccatcgcgaactcctttttctgtatcgtggaaataattttcgttttatttggcaataatgcaatcacaaccggactcatcggatgagtgaagctgaacatgtctcatattgcccgttgttgtcttttccgctccggtggtttatgccagtatggtttgttggctatttggcctgagtcgagcgttgtcgggagcaagtgtgagcagcaaagttgagcaactgcatcagcagttaaaagaacgtattctggttctggatgggggcatgggcaccatgatccagggctatcgtctgagtgagcaggactttcgcggtgagcgctttgctgactggccgtgcgacctgaaaggcaacaacgacctgctggtgctcagcaaacccgaagtgatccgcgagatccacgacgcctatttcgaggccggcgcggatatcattgagaccaacacctttaactcgacgaccatcgcgatggcggattaccagatggaatccctgtcggccgagatcaactttgccgcggcgaagctggcccgcgccagcgccgacgcctggacggcccgcacgccggaaaaaccgcgctatgtcgcgggcgtgcttggcccgaccaaccgcaccgcctctatctcgcctgatgtgaacgatcctgcgttccgtaatattacctttgaccagctggtggccgcctatcgcgaatccacccgggcgctggtggaaggcggcgtggatctgatcctgattgaaacggtgtttgacaccctgaacgctaaagcggccatctatgcggtgaaagaggagctggaggcgttaggcgttgacctgccgctgatgatctccgggaccattaccgatgcctctggccgcacgctttccggacagaccaccgaagccttttataactcgctgcgtcacgccgaagccttatcgtttggtctgaactgcgccctcgggccggacgagctgcggcagtacgtccaggagctgtcgcgcattgccgaatgctacgtcaccgcgcacccgaacgccggcctgcccaacgccttcggcgaatacgatctggacgccgacaccatggcgacgcaaattcgcgaatgggcggaagccggtttcctcaatatcgttggcggctgctgcggtaccaccccggagcatatcgccgccatgagccgggcggtagcgggcctgcagccgcgtcagttgccggaaattgcggtggcctgccgcctcgccggcctggagccgttgaatatcggcgacgatagcctgttcgttaacgtcggtgaacgaactaacgtcaccggctcggcgaaatttaagcggctgattaaagaagagaagtacagcgaagcgctggacgttgcgcgtcagcaggtggaaagcggcgcgcagattatcgatatcaacatggacgaggggatgctcgacgcggaagcggcgatggtgcgtttccttaacctgattgccggcgagccggacattgcccgcgtgccgatcatgattgactcctccaagtgggaagtcattgaaaagggcctgaaatgtattcagggcaaaggcatcgttaactcaatttcgatgaaagagggcgtcgaatcctttatccaccatgcgaaactggttcgccgctacggcgccgcggtggtggtgatggctttcgacgaggttggtcaggccgacacccgcgaacgtaaaattgagatttgccgtcgcgcctacaaaatcctcaccgaagaggtcggcttcccgccggaagatattatcttcgaccccaatatctttgccgtcgccaccggtatcgaagagcataacaactacgcacaggactttatcggcgcctgcgaagacatcaaacgcgagctgccgcatgcgctaatctccggcggggtctccaacgtctccttctccttccgcggtaatgacccggtacgtgaggcgatccacgccgtattcctctactacgcgatccgcaacggcatggacatggggatcgtcaacgccggtcagctggccatctatgatgacctcccgggcgagctgcgcgacgcggtcgaagacgtgatcctcaaccgccgcgatgacagtaccgaacggttacttgagctggcggaaaaatatcgcggcagcaaagcggacgacggcgcgaatgcccagcaggcggagtggcgcacctgggaagtgaaaaaacgcctcgaatattcgctggtgaagggcattaccgaatttatcgaacaggacaccgaagaagcgcgtcagcaggccgcccgcccgattgaggtcattgaagggccgctgatggacggcatgaacgtggtcggcgatctgttcggcgaaggcaaaatgttcctgccgcaggtggtgaaatccgcccgtgtaatgaaacaggcggtggcctaccttgagccgtttattgaagccagtaaagagcagggctccagtaacggcaaaatggtgattgccacggtaaaaggcgacgttcatgacattggcaaaaacatcgtcggcgtggtgctgcagtgcaataactacgaaatcatcgatcttggcgtgatggtcccggcggataaaattctcaaaacggccaaagaggtaaacgcggatctaattggtctttccgggctgattaccccatcgctggacgagatggttaacgtggcgaaagagatggagcgccagggctttaccatcccgctgctgataggcggcgcgactacctcgaaagcgcatacggcggtgaaaatcgagcagaactacagcggcccgaccgtttacgtacagaacgcctcgcgcaccgtcggcgtggtgtctgcgctgctttcggacacgcagcgcgacgagtttgtcgcccgcacgcgcaaagagtatgaaacggtgcgtatccagcatgggcgtaaaaaaccgcgtactccgccggtgacccttgccgccgcgcgggaaaacgatctggcctttgactgggaaagctacacgccgccggtggctcatcgtctgggagtacagacggtggaagccagtatcgagactctgcgcaactacatcgactggacgccgttcttcatgacctggtcgctggcgggtaaatatccgcgcattctggaagatgaagtggtaggggaagaggcgcagcgcctgttcaaagacgctaacgagctgctggataagctgagcgcagagaaaaccctgaacccgcgcggcgtggtgggtctgttcccggccaaccgcgtgggcgacgatattgaaatctatcgcgatgaaacccgcacccacgtgctgacggtgagccatcatctgcgccagcagacggagaaggttggcttcgccaactactgcctcgccgattttgtcgcgccgaagctgagcggcaaggcggactacatcggcgccttcgccgtgaccggcggcctggaagaggacgcgctggcggacgcctatgaagcgcagcatgatgactataacaagatcatgatcaaggccatcgccgatcgcctggcggaggcctttgccgagtatctgcatgagaaagtgcgcaaggtttactggggatatgcggccaatgagaacctcagcaatgaggagcttattcgcgagaactaccaagggatccgaccggcgccgggatatccggcctgtccggagcacaccgaaaaggggaccatctggcagctactggacgtcgaagcccataccggcatgaagctcaccgaatcgttcgccatgtggccgggcgcatcggtttccggctggtacttcagccatccggatagcaagtacttcgccgtggcgcagatccagcgcgatcaggtcgaagattacgcgctgcgtaaaggaatgacgccggcggaggtcgagcgctggttagcgcctaatctgggctatgatgcggactagtcgtcatctttccttacaacaaacaaggcgctctgtgagcgccttgtctctttattgaggttaaccccttatactgagataggttcctgaacttcggaaaacctataacgataaggagaagctgattccgtgttaactctgctacacctgttgtccgcggttgctctgctggtgtggggcacgcatatcgtgcgtaccggggtgatgcgcgtctatggcgctcgcctgcgtaccgttctcagtagcagcgtagagaaaaagccgctcgccttctgcgcgggtcttggcgtgactgcgctggtgcaaagcagtaacgccaccaccatgctggtgacctcatttgtcgcccaggatttagtgggtctgatgccagcgctggtgatggtgctgggggccgacgtcgggacggcgctgatggcgagggtgttgaccttcgacctgtcgtggctgtcgccgttgttgatatttatcggggtgattttcttcctcggccgcaagcagacccgcgccgggcagcttggacgggtggggattggtctggggctgatcctgttggccctcgagctgattgtccaggccgtacaccccataacccaggcgaacggcgtgcaggtgattttcgcctcgctgaccggcgatatcatgctggatgctttgattggcgccgtatttgcaatcattagctactccagcctggcggcggtgctgttaacggcgacgctgaccgcggcgggagcgatctctttcccggtggcgctgtgtctggtgattggcgccaacctgggttcggggctgctggcgatgcttaacaacagcgcggcgaacgcggcggcgcgccgggtggcgctgggcagcctgctgtttaagctggtggggagcctgattattctgccgttcgtccatccgctggccgcggcgatgcacaagctgccgttggccgagtccgagctggttatctacttccacgtcttttacaacctgctgcgctgcatcgcgatggtgccctttgccggaccgatggcgaagctgtgccagcgtctgatccgcgatgagcccgagctggataaccatctcaaacccaagcatctcgacccgtcggcgctggacaccccggcgctggcgctggccaatgccgcgcgcgagacgctgcgtattggtgacgcgatggagcagatgctggagagcctgcacaaggtgatgcatggcgaaccgcgtcaggagaaagagctgcgtcgtatggcggatgatatcaacgtactttacaccgctattaagctctatctggcgcgaatgccaaaggatgagctggcggaagaggaatcccggcgctgggcggaaattattgagatgtcgttaaacctcgaacaggcgtccgatatcgtcgagcgaatgggcagcgagatcgccgataaatcgctggcggcgcggcgcgccttctcggtagaagggttaaaggagctggacgccctgtacgatctgctgctcagcaacctgcagctggcgatgtcggtcttcttctccagcgatgtgcccagcgcccgccgcctgcggcgcagcaaacaccggttccgcattcttaaccgccgctactcgcatgcgcacgttgaccgtctgcatcagcagaacgtgcagagcatcgaaaccagtacgttgcacctggcgctgctgggggatatgaagcgtctgaacagcctgttctgctcggtggcttacagcgtgatggagcagccggatgaagacgacgaacgggatgactactgagccattccccggcggcgctgtactaaccggggttttgcgtttggacgttccgttgaggcagcccggataaggcgcaatgcgccgctatccgggaaacgttagccacccaggctcagaagcggtggcccgcaggcagggttatcgcttcttcccccggtttgaacaacagcgtcgggttcgggccaccgagcgtcgcgtgaccatcggtgacctggatccagtttccttccggcaaaccaatcaccgttaattccggcgccacgaccagcagttcgcggatacgctgttcgcgggtttcgccctgatgcccggtcggcaacgcgttggtgaagtgcgggttaatctgtagcgggaacagccccagcgcatcaaatccctgcggatcgacaatcggcatatcgttggtggtgcgaatggtcgggcaggcaaggtttgaacctgcactccagccgatatacagcgccccgcgtttgacgacatcgacaatcggcgccaacaaaccgcgactgcggcactctttcaacagctggaaggtgttcccgccgccgacgatcaccatctcggtgctttcaatggcggcgatagggtcgtcgacgctgtggataccggttacgctgaccgccatgggcgccataaccgcagccactttggccgtataatcatcccaggattgcgtcacgccagcgaaggggatgaataccgccttacggcggcctttgacctgaccggcaatcagcggcagggcgtgttccagccaggctttccccggcagcgtggagttactgagtaacagcagttccatcttttcttcctgttttaaaaatattattgaagcagaaattctagcatcgcccccataccgacgcgctgatatggcgcatgatgtgggtaagcggaatgctgttcacaagcccgacgaagcttctggataatgaatcacacaatccaggttttttctcgcccacaaggtagggtatatttcgcttttacaggagaatctatgctgcccgactcatcaacccgattaaataaatacatcagtgaaagcggcatctgctcgcgtcgcgaagcggaccgctttattgaacaaggcaacgtctttatcaatggcaagcgcgccacgattggcgatcaggtgaagcctggcgatttagtcaaagtgaacggacggttgattgagccgcgcgaagcggatgatctggtactgattgcgctgaataagccggtcggcattgtgagcaccaccgaagatggcgagcgcgacaacattgtcgatttcgtcaatcacagcaagcgtatctttcctatcggccgtctggataaagactcccaggggctgatcttcctcaccaaccatggcgatctggtgaacaagatcctgcgcgccggcaacgaccatgaaaaagagtatctggtcacggtcgataagccggtgaccgatgagttcattcgcggcatgggcgcgggggtaccgattctcgggaccgtgaccaaaaaatgtaaggtaaagaaagaagcgccgttcgttttccgcatcacccttgtgcaggggttaaaccgccagatccgtcgcatgtgcgagcactttggctatgaagtgacgaagcttgagcgtacgcggatcatgaacgtcagcctgacggggatcccgctgggagagtggcgcgatctgaccgatgacgagctgatcgacctgttcaagctgattgaaaactcctcttccgaagcaaagccgaaagccaggccgaagcctaaagcggcgacccccgggatcaagcgcccggtagtgaaaatggaaaatagcaacgataagggccgcccggctggtaacgggaaacgtttcacccagccgggacgtaaaaagaaagggcgttaacgcctgccgcgggtcggcgtattcgccgaccaggaaaaggtcgcttccttgtccgttttataagcctgctgttttctcacctggcgggctttcttcgcttccgcttcacgctgcgccatcagcttatcgatatattcctttttcacgctgttcgtttccgcattgctcagcgggcggccatgcgcaatacgcgcgcggtcaagcagcgttttcaattcgcgctgttcgcgctcggtcatctctttttgtgtaatacgggggagtgccatggtggtgccctcagtcagaccagagcacccagtgtacggcaatgaatattttactgatagcctgtatggcaactaaagcaggcacacgcccgggcctgcgcccggacgtatcacgctcagcgcttgtcggcttttttggcgatgggctttcctgaccagtacccggccagcagcgaaccggacaggttatgccagacggagaacagcgcgcctggcagcgccgccagcgggccgaagtaaattttacccagcgcggccgccaggccggagttctgcatccccacctcgatcgccagcgtacggcaggtggattcatcaaaaccaaacagacgtccgccccagtacccgccaagcagaccaatagtgttatgcaggatcaccgcgataatcaccaccaggccgacggaggcgatatgggcggcggaacccgccaccaccgcgctgatgatcgccagaatgcacaccatcgagaaggcgggcaggaacggctctaccgctttcaccaccttcggcaacagatgatggacaatcagtcccagcgcgataggaatgaccacaatctgcagaatgctgagcaacatgcccatgacgtcgacctgaatatgcgcgtcgacgtacagacgggtgagcagcggtgtcgccacgacgccgacgagggtggagaccgaggagatggtcaccgacagcgccacatcccctttggcaagaaagatcatcacgttggaggcggtcccgctggcgacgctgccgaccagcaccatcccggcggaaagctccggcggcatatgaaacagcagcgccagcagccaggcggcgagcggcatcaccagatagtgcagaaatatccccgcagcgaccggcgccggacgcgacaggacgcgtttgaaatcctccagcttcagatgcacgcccataccgaacatgatcagcatcagcagggtggtgacccatgggccaattggggtgaaggtagtgggagtgtaataggccagaacggagagcagcagtgcccataacgggaacagccgcgtcagagttgcgagcatgttgtgttccttgctatacgcgaaccgggccgcgccatcccgatgggcggcgagcaggtcagctggttgtgttgatgttgttataaaaaagccgggttcgagcccggctataggtattgtttatcgtgctaaggaattttattcaaacaaattatgatgcagcttctgcacaaccttctccgcatcgtcgcccggcaccaggaagcacaggttgtggctggaggcgccatagcagatcatgcggatgttaaacggctcgaggacgccaaagacctctttgccgacgccgcaggctttcgacagctcattgccaatcagggcgaccagcgccagattttcttccacttccacgcggcacagcgaagagagctcggtcagcagcgcctgggtcagcagggtatcgcccgcagaggtcgagccggtggtgtccatggtcagggccacgctcacttcggaggtggtgatcaaatcaactgagatgttatggcgcgccagaataccgaacacttcggcgaggaagccgcgggagtgcagcatattcaggctgtgcagcgtcagcagcgtttgccggcgacgcagcgccagcgcgcggaacagcggcgggttctcggtggttttacacaccagcgtaccgcccgctttaggctctttactggagccgacaaacaccgggatatcgctgcgcacggcaggcagcagggtcgccggatgcagcactttggcgccaaaggtggccatttccgctgcctcttcaaaggcgatgacgtcgatgcgtttcgccgccggcgcgacgcgcgggtcggtagtatagatccccgggacatcggtccagatatcgacgcgggtggcattcagcgcttcgccgagcagagcggcggtataatcgctgccgccgcggccgagggtggtggtgcggcctttcgcttcgctgccgataaagccctgggtcaccaccaggccttccgccaggcgcggcgccagctgctgctgggtcagttcggcgacggcggcgatgtccggttcggcgcggccaaagcgatcgttagtgcgcagcactttacgggcgtcaaaccactgcgcctgaataccgcgttcacgcagaatttccacaaacagcagggtggacatcagttcgccatggctgaccagttcgtcggtcagggcggttgaggaggcgagcgcggcggcttccgccagcgtcgtgatattttccagcaagcgctcaatctcttcgcggatcacgttgggataacgcaaacgctccagaatattgaactggatctgacgcagagcgtccagctgggaaaaacgttcggtgggttccagccctcccgctaaggccaccagaatgttggtcacgccggcagaggcggagagcacaacaatacgggtattggcatcgagcagcgccacatcgatgctgcggttcattgcgtcaaaatcagcaacgctggtgccgccaaatttggcgacgactagatctgtcataacaacctcgtgtcagggggcctgacttattaaaacgattcctgagcaccgatcctggcaggggctggacgccgccggatcgcaacaaaatgtcttaataagccaggccaaattattcagccatggcacaagggaagagcgataaacagggtggcgcagagtgataaacaactacgatgtcacccagaagtgctccaccttgtagacccgactcaccgctttgggcgctgaggtgttcgggtatgaaacgcccgactgcgaacgtttctggtgacaacccaggggattcagcccctgtggccggcgaggagcgtgaccagacgctctttcacctcggcgttgctccccctcacgtatcttccccggactggttcctccaatacggttacctgggcaacgcacctcttctggcaattactgacgtctttcacctggccgggggaacagggacattatatcccccgcgaataccctttcgctgtagcgtgaaatgcgcgagcaatagatacctaccaatacgtaagcactgcggatatataaaggcttaacgccagctatgtcaacgctgcggttatgcggatttttcatgcctctgcggctaacagaaaaaagccttatgatagctatactaatggggctttttactccgttttgacccgattcctgaccggcgtcagggtcaagtcacaaaaatcatcacaattttccgtcaccggcgctacaatcgaccgaagtcacaatctcaaatcagaagagtattgctaatgaaaaacatcaacccaacgcagacctctgcctggcaggcattacagaaacacttcgacgaaatgaaagatgtcactatcagcgagcttttcgccaaagatagcgaccgtttttctaaattttccgcgacgttcgacgatctgatgctggtggacttctccaaaaaccgcatcactgaagagacgctggctaaactgcaggatctggcgaaagagactgacctggcgggcgctatcaagtcgatgttctcaggtgagaagatcaaccgcaccgaagaccgcgcggtactgcacgtcgcgctgcgtaaccgcagcaatacgccgattgtggttgatggcaaagatgtgatgccggaagtgaacgctgtgctggagaagatgaaaaccttctccgaagcgattatctccggtagctggaaaggctacaccggcaaaccgatcaccgacgtggttaacatcggcatcggcggctccgacctcggtcctttcatggtgaccgaggcgctgcgtccgtataaaaaccacctcaacatgcactttgtctctaacgtcgatggcacccatatcgccgaagtgctgaagaacgtgaatccggaaacgactctgttcctggtggcgtccaagactttcactacccaggaaaccatgaccaacgcccacagcgcgcgcgactggttcctggcaaccgcgggcgacgacaagcacgtggcgaaacacttcgccgcgctttccaccaacgcgaaagcggttggcgagttcggcatcgacaccgccaacatgttcgaattctgggactgggttggcggccgttactccctgtggtcggcgattggtctgtccatcattctctccgtgggcttcgacaacttcgttgagctgctgtccggcgcgcatgcgatggataagcacttctccaccactccggcggagaaaaacctgccggtgctgctggctctgatcggcatctggtacaacaacttcttcggtgcggaaaccgaagcgattctgccgtacgaccagtacatgcaccgctttgccgcttacttccagcagggcaacatggagtccaacggtaagtatgttgaccgtaacggccacgcggtagactaccagactggcccaatcatctggggtgagccgggcaccaacggtcagcacgcgttctaccagctgatccaccagggcaccaaaatggtaccgtgcgatttcatcgctccggctatcacccacaacccgctgtctgaccaccatcagaaactgctgtctaacttcttcgcccagaccgaggccctggcctttggtaaatcccgcgaagtggttgagcaggaatatcgcgatcagggtaaagacccggcgaccctggagcacgtggtgccgttcaaagtgttcgaaggtaaccgcccgactaactccatcctgctgcgtgagatcaccccgttcagcctcggggcgctgattgccctgtacgagcacaaaatcttcacccagggcgcgatcctcaacatcttcacctttgaccagtggggcgttgagctgggcaaacagctggctaaccgcatcctgccggagctgaaagacggcagcgaagttagcagccacgacagctctactaacggcctgattaaccgttataaagcctggcgcgcataacgcttgcgcagctaagacggaatgccgaccctttggtcggcatttttatttatagccgccgcagcagcctcgccggattccccgcccacacgcctttctcggtaatggacttcgttaccacgctgcccgcgcctatcaccaccccatcgcagatgctgacggccagaatcgtggcgccgctgccgatcgacacgtcatcgccaatctcgatccgcccccagctggcgcggtcggcgtttggtttaccctcgcgaaacaggtcgttggcaaacatcacgccgtgaccgataaagcagcgctggccgatggtgacgtactcgcagataaaggtatgggactgaattttactgttcgcgccgatgcgggtattcccctggatctcaacgaacggcccgacgaagacgttatcgccgagctggcaatcatagaggttggcgggctggtaaataacgacattttccccacaaacgacgttacgtacaccggtatcacgaagctcaggcatagttcctctcaaatcggtttggccagaatatgtaaggtgctttgctggctggcggagtggaaaatcgtgtctctgatgtgctgcatcccctggcgttcgtaaaaacggcgcgcggcgggattcgcggcgagtacttccagccacagccaactttcaccggccgtttttgctcgcgtctcgacggcgtgaaaaatatgctcgccgtagcggtggccagtcttccccggcatcaggtagagcttatgcagcagcgtaccaatcttgccgtcgtcagccattcgctgctgatagctatatttagcgaaaccaacaggagagggggcttcggcgatgagccagtgttgggtcgcatccgcaagactccgacgtagcgcatcttcggcatattcttgcttaagaaataacgccagttcatcggcatcgcgccagagatgagcaaagtggtgatgatagctggcatagcccatcgcgctaagctggggcgcgtcctcgggacatgcctgtcgaatagttaacatgctgcgttcctcgcgtcgttctgcggctatattgcctgtaaagtgaacaatgtggaacgacaaaaatcggtgggagaaggctggaggcgctccctccagcctgggggttagcgggcgaaagcgatcgcttcgatttcgacgccggcatctttcggtaaccttgctacctccacacaggagcgcgccggaaaggccgcctggtgttcgataaagaaggcctcgtaggcggcattgatggcggcaaaatccgccaggtctttgacaaacaccgtagttttaacgatctgcccgaccgtgagtccggcagcttcaacgatggctttcacattttccagtgattgccgcgcctgttcggcaatgtcctcgggcatggtgccgtccagcggattaatcggcagctgaccggaggtgatggtcatcgcgccgagattgacgccctgcacgtacgggccgatagcagcaggcgcgtcagcggtggtaataatcatacggtttatccttcaaacggttacataaaataatttaacaacaccagcgagccgacgccgctcactaccacccacaccaggcctaaacggaagctggcgagcgtgcagatgatggcggcgatcaccttcggattttttaagtcgaactccatgctgcaattcacgctcaggatctgaatggtgatgatggccggcagaacggtgaccggcacgaagcgtagcgttttggtcacccgctcggacatctggatcttgccggccaggccgataaacgagaaacggatgagaaaagtcaccgcggccatgcccagcgtcagggcgataaaatagctattactcattttccatcgcctccactaacggcatatcggattcggtttttgccatctgcttgcgctcttccgccaggtcgacgcacaggccggcgaggacgccaagcactgaggcgacgacgatacccagcgaatagggtaggaccactaacagcacgccggaaacggcggctacaaccgcggcgacggtgcaggcctggcttttaatttgcggcaccacgatggcgataaaggcggcgaccatggcgaaatcgagaccgtatttctcaatgtggggaaacgaggcgccgaccagcgcgccaagaaaatcagccagcacccaaatcgcccagaaggtaatcatcgccgaaccataaaacagatatttttcctttttatttccttccatctctttgacggtggtggcatacacctcgtcggtgagcgcataggacataaagcattttttaaagaatgaagcttcgcgcacggtgccggaaatagaggcgctatacagcacgtggcgaagatttataattaatgtggtgaaaataatcacgccgagcgtggcgccggtttttaacatattcagtgccagcatttgcgccgagccggcaatgacaatcgccgaccacgccgtactctgccagacgctcatgcccgcgctaacgcttaatgcgccgacaataaatgaaaatggaaagtcgccgatgcataggggcataatagcgctggcgccgcggaagatgacttttttattcatctgctatacctgctaatttataaataatagtgtgggtagagtacgttaatcggggcctgctctttcaggcccgtgaaatggtattatttagcgaccataatgctgataatttctttatcggtgagagtcattggtttaatcaccagacggcacaggttattaatagtctgctcgacatcggcgcacacaataccgtcattggcgccagcgcagctattttgcatggccattagtaccgccttaaaggcgctggataccactgacgagactttcatcgcgcagctgttggaagcgccatcacaaatcatgccggtaatatcgctgaccatattaataattgcggtattaatggtattgatgtcgcgggtaaacagccaggccataccggcggcggcgcccatagcggcggttgaggctgcgcatagcgcagataagcgcgtataacgagaatgaattgagatggcggtgagatgagagagagacaaagcgcgagccagggtctcttcatcgacgccgagatgctctgcaaccaccactaccggcatggttgctgtaatgccctgattgcctgagccgaagttagacatcgctaccaccggcgcgccgcccatgcgggcatctgaagcggcgacggtgttgatgatcaccttgcttaacagatcgttgctcatcaggccgtttttcactgcgtcagaaaaggtaccgttaatgttcaggccatatttttttgttttgccttctgccgccagcgcggagtttaagcgcgcggcgtcgagaataaagcgaatatcattaaagtcgacgcgattaataaattcgtaagcctgttgtagcgagaaagtgggcagcgtttcgcgctgggtgcgcgtattctgtttttcgcttaatggctgcggttggccattaatataaagttcgaccacgttggtgtgggttcctttgaccacgacacgacagtaattctcgccagcagagagggttaaatcgagatgaataaaatccggggtctcttcgacggcaatatcaacggcgttattggcgatcagcttctgcgccatttcaacgtgtcgcggagtgatatcttccagcgtttttaatcccttttgcgggtcgccgccaaatgcgccaattgcggctgccagcggtacaccgcaaacggtggtgccgggtatggtgacgcccatcgcgtttttataaagattggcggaaataaaaccgctaattttagtgcaaggctgatccagatattgtgcggcgtaggcggccgcgaaggaaatagcgacgggttcagtacaacctaaagccggggcgacctcttgtttgagccattttacgtacagggaagcgttatcggtgttcataatgatttaatgtccaaaattaaattttattcagctgcgataatgctaagacaaaagataagaaaaaacttaccctaataaccataaaaagactgtggtttggagaaaaattttatcttacgggaggttttaagatacatctgtttcaaaaagtaaactttttatatttcagttggttgggttgattcgttctaagcgtaacggatgattttgttaatctgctcacagcgttgctggaaggacaattttctcttgttcgtacttttcgaatcaatagcccggagatagcgtaaggcgaaggaatcataggtagatctggatcacacttttgcgctatacagatcgacaacgttcatgcatttgaggtgtcactatgccgtcggtatatcgtccgctggttaatttcgttgcgaaggccatgcaggccgtgctgaatctggcactgctgtgcctgggaattattctggtggtgttcctgggaaaagagaccctgcatctggcgcacgtactgtttacgccggagccggtgagtaagtacaagctggtcgaagggctggtggtctattttctctactttgagtttatcgcgctgattgttaaatattttgaatccggttttcactttccactgcgctatttcgtctatatcggtattaccgcaattgtgcggcttattatcgtcgatcatgagtcgccgctggcggttctcatttactccgcggcgatcctgatcctggtgattacgctctggctgtgtaactccaatcgcctgaaacgcgaataaaaaaaagcggcctccagggccgctgaccaacagtcacaaatagaatttatgtagggtccagttgaggatagcagtggcattgaccttactttttcagctgagggcgacggcgacaatacccggttggggtcgtgtattgcggctagaccgtcggccctcctctgaaatttggggccggtgttacaaaaaaattaacctttcactccacccgccgtcaggccattaaccagccagcgctgcgccagcaggaagacaaccgtgatcggaatggcggagagcaccgccgcggcggcaaagtcgccccacagatagttctgcgggttgagatactgttgcatacctaccgccagggtatagctgttcacatcgcgcagcagcagcgaggcgaccggcacttcggtgatggccgcgatgaacgacagaataaacacgactgccagaatcggcaccgacagcggcagcagcaccagacggaaagcctgccatggggtcgcgccatccagcgccgccgcttcttccagcgagccatcgatggtttcgaagtagcctttaatcgtccagacgtgcagcgcgataccgcccatgtaggcaaagatgacgccgccgtgggtgttgaggccgacgaacgggatgtactggcccaggcggtcaaacaacgcgtacagggcaaccagcgacagcaccgccgggaacatctggaaaatcagcatccctttcagcagggccgctttccccgggaagcgcatacgggcgaaagcgtaggcgcaggtggtggagagagcgacgataccgatcgcggtgatcccggcgaccttaatcgagttccacagccacagcaggaccgggaacggcggcggcgtgacgcggccatcggcgtgttcgacgctgaagcctaacgccagacgccagtgctcccaggagatggtatccgggatcaggctgccggtggcgaagttgccttcgcgcagcgagatggcgataaccatcagcagcggaaacataatcgcggcgataaaaatcagtagcaggagatgcgtggtaaataaacgtagcttctgcgatttgggttggaccatagccattatcgttatctcccttaatcaaacttcatgcgcgtggctttcagattcacaatcgctaacgcgccaaccagcaggaagataagcgttgcgatagccgccgccaggccgaagtcctgaccgccgccgccttcaaaggcgatgcgataggtgtagctcaccagcaggtcggtataaccggccggggtggtggtgccgagacggtccggaccgccgttggtcaacaattgaatcaggacgaagttgttaaagttaaaggcgaagctggcgatcatcagcggcgttagcggcttaatcagcagcgggaaggtaattttaaagaagttctggaacgggccggcgccatccattgccgacgcttcgtacagatcgtccggaatcgccttcagtagccccatgcacaggatcatcatgtacgggtagcccagccaggtgttgacgatgatgatcatggtgcgcgcggtggtcgggtcgctaaaccatgccggcttaatgccgaacagcgtgctgagcatcatgttgatttcaccaaagctctggttgaacagccctttgaaaatcagaatcgaaataaacgacggtacggcgtacggcagaatcagcaggacgcgataaatcgctttgcctttcagcgcttcccactgcaccaggcaggcgaggatcatccccaccgcgacggtcagcatcacggtcagcaccgagaacaccaccgtccagacgaagatcgcgaagaacggtttctgaatgccttcatcgtggaagacgcgggtaaagttgtcccagccgatagtcacagtgtagcccgggctcagcttctcattgccccagctgccgtcggcgttaattgcctggtagaagccgacgtcgttgttcgggcggtatttaacgtgggtctgattgttggtcagtaccccgtcttcgccgagggtatacagaggctgggtaccggagaactggcgcagggagctcatgatgactttgctgtcatccggcagcacagcggtcagctggttcagcgcggtgcgattctgggtaatcacgcgcaggttggcgcgctcgccttccggcagggcgtcggtttcttttaacgccagcttctgctcgccgccaaatttaaaggcgtcagaaaggtagtttttaccgctttcgccgtcggtgagcgccagcttccactcgtcacccgcagggatcagcgtgaaattataggctttgccggcctggaaggaacgatccatcagcacctgctgcgcacgctcaaaggtcagctggttggtgctgctgtagttggtaaacgcgatagcgatagtgcagatcagcggaaacaggacaaacaggcccatgccggcgaggccgggataaacatagcgccaggcataagccttgcgattagcgaaaatatacaggccaactgagcttaaaatcagcgtcatgatggcgaacaggtactccccctgggcgtacatcaaaacaacaaggtaacccaccagcaggcacagtaagccaatcacagaccatgtgagttgcgggctttgccaccagtgtctctttttaacggcatccatggggatcatcctctacagcggtgaaaacttatttgtcaggtggcgcttcgcttacctgacctacggtccgagccgtagtggtagggcgggtaggcgcgcgcgccacccgccgttttcttacttagtgatacggctctgtgcatctttcagcgcagcatcgacagtctggcgaccgctggcggcgttgataaccgcggtacgaacggcataccagaaggcagacatctgcgggatgttaggcatgatttcgcctttctgggcgttcgccatggtggcagcgatgcgcggatctttttccagtttttcctggaaggatttcagcgccacggcacccagcggtttgtcgttgttaacggcttccagaccctgatcggtcatcaggtagttttcgaggaactctttggccagctctttgttcgggctggcggcgttgatccccgcgctcagcacgccaacgaacggtttcgatggtttgcctttaaaggttggcagcagggtcacgccgtagttaaccttgctcttatcgatgttagaccacgcccacggaccgttgatggtcatcgcggtttcgcctttgttgaaggccgcttccgcgatggagtagtcggtgtcggcattcatgtgcttgttcttgatcaggtcaaccaggaaggtcaggcccgctttcgcgcctgcgctgtccacgccgacgtctttcacatcgtacttgccgttttcaaacttgaacgcgtatccgccgtcggcagcgatcagcggccaggtgaagtacggttcctgcaggttgaacatcagcgcgctcttacctttcgctttcagttctttatccagcgccgggatctcttcccaggtcttcggcgggttcggcaccaggtctttgttgtaaatcagggacagggcttcgactgcgatcgggtaggcgatcagtttgccgttatagcgaaccgcatcccaggtgaacggatagagtttgtcctggaacgctttgtccggggtgatttccgccagcaggcccgactgcgcgtagccgccgaaacggtcatgcgcccagaagatgatgtccgggccgtcgccggtcgccgcaacctgcgggaatttctcttccagcttgtccgggtgttctacggaaactttaatgccggtgtctttttcaaactttttacccacttcagcgaggccgttgtagcctttgtcgccgttaatccagataaccagcttaccttcttcaatttttgcgagggcagaggcggaaaacatcatcgtggtcagtgccgacagcgcgaggatgcgagcgccagttttgattttcatatacccgtcctttttggtgttgtactcgtggatacacttcggtggcttaacgatgatgagtttccttttttaacaacccctttccatcctccccaggtctacgccccacccgctggttgtgtgatctccattgcaaaaacggccgtattgcgtcctggagcacagaaaaaagcgcccaattttgtcgcctccatcacgaaatcacgctccgcccgccatcccccgcggcgagagccaatctctcatcctcccatctcctcccccataaaaaagccggggggtggaggatttgcctgcgtaatgaatgccgcatagtcgacccatcttgaatgtgactgttagtgacaggttgtaacgaagggagaagggcatggcgagcgtacagctgcgaaatgtaacgaaagcctggggtgacgtggtggtatcgaaagatatcaatctcgatatccacgaaggggaattcgtcgtgtttgtcgggccatcgggctgcggcaaatctaccctgctgcgtatgattgccgggttagaaactattaccagcggggacctgtttatcggtgacacccgcatgaacgagatcccaccggcagaacgcggcgttgggatggtattccagtcttatgcactctatccccacctttccgttgcggaaaatatgtcgtttggcctgaagctggccggcgcgaaaaaagatctgattaaccagcgggtgactcaggttgcggaagtgctgcagctggcccatctgctggagcgtaaaccgaaagccctctccggcggtcagcgccagcgcgtggcgattggtcgtacgctggtggcagagccaagcgttttcctgctggatgagccgctttccaacctcgatgccgccctgcgcgtccagatgcgtatcgaaatctcccgtctgcataagcgactgggccgcaccatgatctatgtcacccacgatcaggtggaagcgatgaccctcgccgacaagatcgtggtcctcgacgccggccgtgtggcgcaggttgggaaaccgctggagctctatcactatccggctgaccgcttcgttgccggcttcattggttcaccgaagatgaacttcctgccggtcaaagtcaccgcgacggctatcgatcaggtgcaggttgaactgccgaaccgtcagcaaatctggctaccggtggacagcgccaacgtgcaggcgggcgccaatatgtccttaggtattcgaccggagcatttactgcccagcgatatcgccgatgtaacccttgaaggcgaggtccaggtcgtcgaacagctcggtcacgaaacgcaaattcatatccagatccccgccatccgtcagaacctggtttaccgccagaacgacgtggtgttggtagaagagggagccacattcgctatcggtttgccgccagaacgttgccatttattccgtgaggatggcaccgcttgtcgtcggctgcataaagagccgggcgtgtaaggcttcccattaaaaaagcgcgaacccggctggcgatataccggcgaagcgtgcaaagaaaagcaatgatctcaggagatagaatgatgattactctgcgcaaacttcctctggcggtcgccgtcgcagcaggcgtgatgtctgctcaggcgctggctgtcgatttccatggctacgcgcgttccggcattggctggaccggcagcggcggcgagcaacagtgcttcaaagcgaccggcgctcaaagtaaataccgtcttggtaacgaatgtgaaacctatgcggaactgaagctgggccaggagctgtggaaggaaggggataagagtttttatttcgatactaacgttgcctattccgtgaatcaggaagatgactgggaaagcacctctccggcgttccgtgaagccaacatccagggtaaaaacctgatcgactggctgccgggctccacgctgtgggcgggtaaacgcttctatcagcgtcatgacgttcacatgatcgacttctactactgggatatctccggcccgggtgcaggtctggaaaacgttgaccttggcttcggtaagctctctctggccgctacccgtaactcagaaagcggcggctcttatactttctccagcgatgacaccaaaaaatatgctgcgaaaactgccaacgacgtctttgatatccgtctggcgggtctggaaaccaacccgggcggcgtgctggagttaggggtcgattacggccgtgctaacccgcaggatgactatcgcctggaagacggcgcgtcgaaagacggctggatgtggaccggtgaacatactcagtctatctggggcggcttcaacaagtttgtggttcagtacgccactgacgcaatgacctcctggaacagcggccactctcaggggaccagcatcgataacaacggcagcatgatccgcgttctggatcacggcgcgatggacttcaacgatgactggggcctgatgtacgtggcaatgtaccaggacgtggatctggacagcaagaacggttctacctggtacaccgtgggtgtccgtccgatgtacaaatggacgccgatcatgagcacccagctggaaatcggttacgacaacgtgaaatcccagcgtaccagcgaaaacaacaaccagtacaaaattactctggctcaacagtggcaggcaggcaacagcgtctggtctcgtccggctatccgtatcttcgcaacctacgcgaagtgggatgaaaactggggctacagcaacacctccggtctgcagacgaaagacagcagcggaagcggcgctttcacctccagccgcggtgacgacagcgaagttaccttcggtgcccagatggaagtgtggtggtaataccgtccgcaggacgggtgtaacctgggaggggcgtcagcccctcctgattattcagggttagcgcgctattgcctggctaccgctaaaccgatgctatccaaggtgagaagaatgaaaatgaagaaaactctcgtcgctctgtgtttatccgcagggatgttggcatgcgtgccggggatgagccttgccgatgttaactttgtaccgcagaacaccagcgccgcgccggctattccagccagcgcgctgcagcagctgatctggacgcctgccgatcaatcaaagacgcagagcgttgatttaaccaccggcggtcaacgcctggatgtcccggggatcgtcggaccggtcgccgcctggagcgtgccggccaatatcggtgagctgaccctgacgctcgacagcgaactgaacaaacataaacagatttttgcgccgaacgtgctgattctcgaccagaacatgacgcccgcggcgttcttccccagcaattactttacctatcagcagccgggcgtgatgaccgctgaccgcctgggcggcgtgatgcgcctgaccccggcgctgggccagcaaaagctctatgtgctggtgtttaccactgaaaaagatctccagcagaccacgaccctgctggatccggcgaaagcctatgccaaaggcgctggcaatgcggccccggatatcccggatccgatcgctaaacataccaccgatggcgtgctgaagctgaaagtgaaaactaatagcacttccagcgtgctggtagggccgctgttcggctcttccggcccgggtccggtaaccgtcggcaacaccgcggcgccggtagccgcgccagccgccgccgcggcgccggccgccaaaagcgaaccgatgctcagcgataccgaaacctacttcaacaatggtattaagcaggcggtgaaacaaggtgacatcgacaaagccctgaaattgatgaacgaagctgagcgcctcggctcgaaatccgctcgttccacctttatcagcagtgtaaaaggcaaggggtaatcgtctccccacaatgctgatgtttaggcacagcctttaggtgcatcctccgggatgcacctttttttgcacgcgcggcagcctgttgcatgactgttgcgtgaatgatcgtatattgacgtttgcccgccaccaaccgcctattctgcgatacaatgctttcacgttatgtaccggagaatcaggcatgtcccatcctgcgcttacgcgactgcgtgcgctgcgctattttgccgttatgccatccctgccgccgccgctaagtgactggctgctgctggaggactcaatgacccagcgctttgaacaacaaggaaagcaggtcaccgtgaccctggttaacgaagggtatatcggccgtgacgcgctgactgacgaagcggcgctgctgcccgacgagccgcgctactggctgcgggagattatactcaatgccgatggcgagccctggctggccgggcgcacggtggcgccggagtcgacgctgtgtggtccggagctggcgctacagcagctcgggcaaactccgctgggccgatacctgtttacgtcgtcgacattaacccgcgattttattgaaattggtcgcgatgcagcgctgtgggggcgtcgttcccgcctgcggctgagcggcaaacccctgctgctgaccgagctttttttgcctgcgtcgccgttgtactaagaggaagaaaaaatggagtggagtctgtcgcagaataagctgttggcgtttcatcgcctgatgcgcactgacaaaccgatcggcgctttgctgctgctgtggccgacgctgtgggcgctatgggtggcctcgccgggcgtcccgccgctgtggatcctggcggtattcgtcgccggcgtctggctgatgcgcgccgccggctgcgtggtgaatgactatgccgaccgaaaatttgatggtcacgtaaagcgtaccgcccgccgtccgctgccgagcggcgatgttaccgagaaagaggcgcgaacgctgtttatcgtgctggtgctgctctctttcctgttggtgctcaccctcaacaccatgactattttgctgtcggtggcggcgctggcgctggcgtgggtctatccgtttatgaagcgctacactcatctgccgcaggtggtgctgggcgcggcctttggctggtcgatcccgatggccttctcggccgtcagcgaatcgctaccgctgagctgctggctgatgttcctcgccaatattctgtgggcggtggcctacgatacccagtatgcgatggtggatcgcgatgacgacgttaagatcggcatcaagtcgacggcgatcctgtttggcgaaaacgatcgtctgattatcggtatcctgcaggtggccgtactggcgctgatgggcgcggtgggttggctgaatgggctgggctgggaatattactggtcgctgttcgtggcggcgggtctgtttggctggcagcagaagcttatcttcaatcgcgaccgcgataactgcttcaaagcgtttatgaacaataactacgtcgggctggtgctgttcctcggcctggcgatgagctatctgtaacctcctgtccgctgccccccggcattccggggggcagcaaacgccgcgttacgcgtcgtcctgcgtgacgctctcaatggtcagtcggacatccgacgtaatcaaatccgccagcatccgataaaccttcagggtctcttccggctcggcgtcgccggtgtcgctgatatagccttcatcgcgcagggtcaacaccagggtgctgaacaccgctttgtcgaagaactccggcgcattgatgccgtgtagcaccgacagacgctgggccacggtgcgactctctttttccagcgagctgcggttgatcgccgggttagcgctcagcagccagaaggtgatggcatagcgctgcagcgtctcgcgggcgccagcggccagcagctgcagggagcgagagtgcgacgggttgaggctcatgacatcgccatcgacgacgatcagctcctgacgcagcatctcggcaatcagcgcatccaccactccggccagctccgctttttcccagcgcaggaacagctcggccttgaggaacggatagagtgtttccacatgacgcagcacttcggcgcggctgagatgacgatgctgagtcaccagagcggctaacagcgacggcatcaccagcatatgggcgatattgttgcgatagtaggtcatcagcaccgcctgctcgcgcggcaggatgatgatgtcgccaatggtgtccttctccacttcgaacttgttcatctgcagcgcatgatcgatgagctcgctggccgaagcggatggggcggtcgcatccggagaatagggcacattgcgcagcagcgcgaggtagcactctaactgctgggtgagctgctcacgggtcagcgaacgttggcgggaggccagtagcgccgtacagcacaggttcatggcgttggccgcgccggcgttattgatgcgcaccatcaggtcagcggcgatgctattcaccgtcggcgtcagccaggaggggcgaaccgcttcgatcgggtcgatcgcttcccgccaatccggcacatgctggttaagataggtcatcagcggcagcggttcgccgaagttaacgtaaccctggcccaggttgcgcagcttgcttaaaccgcgcaccatctgcggcagactctctttctctttagtggcgccgcgcagctctttggcgtaggttcctacctccatcacgtgctcatagccgatgtaaatcggcaccagggtgatcggtcgggttccgccgcgcagcatcgcctggatggtcatcgacagcgtaccggtcttcggatcgagcaggcggccggtacgggagcggccgccttcgacgaaatactccacggaatagccgcggctgaacagttcgccaaggtattcgcggaacacggtggaatagagtttgttgcccttaaaggtgcggcgaataaagaaggcgccgaggcggcggaagatcggtccggccggccagaagttgaggttgatgcccgccgcgatatgcggagggaccagcccctgatggtacaggacgtaggagagcagcagatagtccatgtggctgcggtggcaggggacatagacaatttcatggccgtcgtgcgccagctggcgtacgcgctcggcgttatgcacgttgatgccctggtacaggcggttccaggtgaagccgagaatgcggtctgtcaggcggatcatctcgtatgagaagttcgccgcaatctcttccatcagcgcgatagcgttctgctgtgccttctcgtgcgaaattttcttgctgcgcgcttcgtcttccaccgcgcgggcaatcgctttcgaggccagcagtttattaaacagatcctggcgggccggcagacgcgggccgacggcggccagccgctggcgggcaaaatgcatgcgagcgacgcgagccagcttctgggcgatgatcttatcggtaccgtgctcatccgccatgcggcgcagcgaaacggacggcgagaagcgcacgaagctgtcgcggccgagccaggagacggcgaaaaatttctgaatgccgttcagcatccgcagcggcggattgacttctcctttctcgcgacccggcgaacggccgaacatgaccgaaaccggcaccatttgcacatcgaggtccggatggttgcggtgcagatcgaggtaatcgtggaacagcttgatggactcttcttttggcgtgtaataagtaaatacgcgcggcccaccgtggatgaatacgtaacgcggcagcagggcgccgtcgatttccagcggttcaagcgggtcaggtaaatcatgcgccaggcattgggcgcgcagcgtcagcaggtccgccttcgaattatagggcaggacgtacatgaccggacgcgaggtatcgagtcctaattcctgggcaggctctgccggaatagacttgctttttaccagcacctgtaatggtaaattcagtaatttatagtaaattcgttgccagccggacataaacgatgtgaagcctctggttaatcatgcaaatgcgcggcaagaataacagaaagtgggcaaaatttccgttaccacgcggcaaacgcgcacactcatcgacgtcatttacgtaaaaaggttttgtgatggccaataataccaccgggttaacccggatcattaaggcggcaggttactcctggaaaggatttcgcgcggcgtggatcaacgaggctgcgtttcgtcaggaaggcgtcgccgctatcgtggccgtcgcggtagcctgctggctggacgtcgacgccatcacccgcgtattgctgattggctcggtcctgctggtgatgatagtcgaaattctcaacagcgcgattgaagcggttgtggaccgtatcggctcggattttcacgagctttcagggcgcgccaaagatatggggtcggcggcggttctgctggcgattatcatcgcgctgatcacctggggaacgctgctgtggagccattatcactaacgttcttcgctaaacctcgcaaaatatgaacaatccgccgatttttgtgtgccatgtggttccaaaatcaccgttagctgtatatactcacagcataactgtatatacacccagggggcggaatgaaagcgttaacgaccaggcagcaagaggtgtttgatctcattagggatcatatcagccagacgggcatgccgccgacgcgtgcggaaattgctcagcgcttggggttccgttccccaaacgcggcggaagaacacctgaaagcgctggcgcgtaaaggcgcgatcgagatcgtctccggcgcttctcgcggtattcgcctgctgacggaagaagagcaaggcctgccgctgatcggccgcgtcgccgccggtgagccgctgctggcgcagcagcatattgaaggccactatcaggtcgacccgtcgatgtttaagcccaacgccgatttcctgctgcgcgtcagtgggatgtcgatgaaagacatcggtattctggatggcgatttgctggcggtccacaaaacccaggatgtgcgtaacggccaggtggttgtcgcgcgtatcgatgaagaagtgacggtgaagcgcctgaaaaagcagggcaatgtcgttgaactgttgccggaaaacagcgagttttccccgatcgtcgtcgatctgcgccagcagagttttaccattgagggtctggccgttggcgtgatccgtaatggagaatggctgtagcgcctgcctctgcgcagcgtcatctgttgcgtgacgctgcgacgtttttcctcaatcaggtcctcaaacatgctgctcaacgctgccgataaagcgctgtggcgtcttgccctccctatgattttctccaacatcaccgtcccgctgctggggctggtggatacggcggtgatcggccacctggacagcccggtatacctcggcggcgtagcggtcggggcgacggccaccagtttcctcttcatgctgctgctgttcctgcgcatgagcaccaccgggctcaccgctcaggcctggggcgccaaagatccgcagcgcctggcgcgggcgctggtgcagccgctggccctggcgctgggcgccggggtgctgattatcctgcttcgcctgccgctaattgacctcgctctacatattgtcggcggcagcgaggcggtgcttgagcaggcgagacggtttctcgaaattcgctggctcagcgcccccgcctcgctggccaacctggtgctgctcggctggctgctgggcgtccagtacgcccgggcgccggttattctgctggtggtgggtaatctgttgaatattgtgctcgatctgtggctggtgatgggcctgcggatgaacgtccagggagcggcgctggccacggtcaccgcggagtacgccaccctcattattggcctgctgatggcgaagcgggtgctgacgctgcgcggcgtgtcgctggcgatgctgaaaaatgcctggcgcggggatctgcgccgtttattggcgttgaatcgggacatcatgctgcgctcgctgctgctgcagctgtgctttggcgcgctgaccgtattcggcgcccgtctgggcagcgacatcgtggcggttaacgccgtactgatgaccatgctgacctttaccgcctacgcgctggatggctttgcctatgccgtggaggctcactccggccaggcctacggcgcgcgcgacggtagccagttgctggaggtgtggcgggcggcctgccggcagtccggcatggtggcgctggcgtttgccctgatttacagcctggcggggcagtacattatcgcgttgttaacctcactgccttccctgcagcagctggccgatcgctatctgatctggcagacgatcctgccggtggtcggcgtctggtgctatctgctggacggcatgtttatcggcgcgacgcgcggcgctgagatgaggaacagtatggcggtcgccgcggcggggtttgctgtgacgctgcttacgctaccggtgcttggcaaccatggtctgtggctggcgctggcggtgttcctcgccctgcgcggcctgtcgctggcgctgatctggcgtcgtcactggcgacgcggcacatggtttagttagtcatctcccgtcattgccggtagccgtgaccttccccggtcgcgctacgtttacagggcgattcaatagcccggctcagcgtggcgcaggccgggaacatcctcttcgcgttatcccgcggtgcgatggttaaaaattccgaataacgaatcgacgccagcattctcatctatagttaataccatgtccggcacaaaacgggctgtaaacccaccgaatgatgaggacgttattatgaataaagacgaaataggcggtaactggaaacagtttaaaggtaaagccaaggaacagtggggcaaacttaccgatgatgatatgaccgtaatcgaagggaagcgcgaccagctggtcggcaaaattcaggagcgttacggttatgagaaagatcaggctgagaaagaagtctcagactgggagcataagaacgactatcgctggtagcgttccttgatccgaagaatgaagcatttgtgttagtgcctgtctgaatggcgcagggacgcgccgttaaccctttttcccgctgcggcagccgctcagcgggctttctttttgagctgaatagtatgatcgtgctggcagtgtcccggggtgctgcaggcttcgacttccacgcagcccgcgcaaagcccgtgagcttctatcacattgtggcgcagggcaaaccccatgcgggccgccagcgtatgcatgatatcttccaccccttccgccgcttcttcttttaccacgccgcagcggtcgcagataaacatggccgagctatgggtcggctggtcgaacagatggcacagcacatagctattggttgactctaccttatggacaaaaccctgctcgagtaaaaactccagcgcacggtaaaccgtcggcggcttcgcctgcggctctttctcacgtagcaagtccagcagatcgtaggcgctgattgccccttgctgcaggctcatcaggcgcaacacttccagacgctgtggagtcaggcgtacgccgcgctgtgcgcaaagcttttcagcatgcgctaacatctcttgcgaaggggtcttatccatgagcatcctcgggttgcgtgaatttgaatctgttactttatcacgttcctcagaaaacaccgagagccggcaggtgatacgggtcatacttcaggttgtcggcaccggcgcccgtcccgagcgctggccgcttattctcgagcagactacgccttagccgctcgctaaaaccaccatgtccgatttaatcacaacacgcccgaccctgggtatgctatatctgaagtgtctcattttcgggagaaaacgatgaaacgacctgattgcattcgccactggcgcgaactggaagggcccgacgatgctacttatcccgacagcccggagcgtttttcaatcggcgcgccgctggggcgaggtttacgtctcaaccggctggggatccaccacgagcggctgccgcccgggcggcgcacctcttatccacacgcggagagcgatgaggaagagttcatctacgtgctggagggctatccggaagtgtggataaacggctatctctggaagctggagcccggcgacagcgtgggttttcccgctggtaccggcatctgccacacctttctcaataataccgagcaggaagttcgtctgctggtggtgggcgaggccaacaagaagtacaaccgcatttattacccgctcaatcccggctatgccgcgacgcgccaggatcgttgggttgaccatccgccgcagttcttcggtccacacgacggcaagccgcggaaaaagtaatcatttcaggtgaggggcgaagcgcggcgcactatgcgcctgtggtgtatctttatgctatagtagcgcccctttttacccggatgcttatttattcgccatgatgcctgaatcaacgtcacctgttttccctgctcaccgcttctccatcgcgccgatgctcgactggaccgaccgacactgccgctacttcctgcggctgctgtcgcggcatacgctgctgtataccgaaatggtgaccaccggggcgattattcacggcaaaggggactatctggcctatagcgaagaagagcacccggttgctctgcagctcggcggcagcgatccccaggccctggcgcagtgcgcgaagctggccgaggcgcgcggctatgatgagatcaacctcaacgtcggctgcccctccgaccgcgtgcagaacgggatgtttggcgcttgcctgatgggcaatgcgccactggtggccgactgcatcaaggcgatgcgcgatgtggtgtcgattccggtcacggtgaaaacccgtatcggcattgacgaccaggacagctatgagtttctgtgcgatttcattgagacggtctccggcaagggcgagtgtgagatgtttattattcacgcccgcaaagcctggctctccggcctgagtccaaaagagaaccgcgagatcccgccgctggattacccccgcgtctggcagctgaagcgcgatttcccccaccttacgatggcgatcaacggcggcatcaaatcgctggacgaagccagagtacagcttgagcatatggatggggtgatggtcgggcgtgaggcctatcagaacccgggcattctggcctcggtcgaccgcgaaattttcggcgtcgccggcgcggatgccgatccggtagcggtggtgcgagccatgtacccctatattgagcgcgagctcagcaagggcacctatctgggccatattacccgccatatgctggggctgtttcaggggatccccggcgctcgccagtggcgtcgctacctgagcgaaaatgcgcataaagccggcgccgatattgcagtgctggagcaagccctgaagctggtggcagataaacgttaatttctgaccaaaacctggtgaaattgaccacgcctcgcgcaccgtcgcggggcgttttcttttaaagtcaagtgcttatgtttggcatgctttttgtaatacctgcagagtgaagtattcattctttggggagagaaccatgctggaactgctatttgtcattggattttttgtcatgctgctggtcaccggcgtatcgctgctggggattatcgcggcaatcgtggtggcgacggcgctgatgttcgtcggcgggttgttcgccttgatgatcaaattactgccgtggctgctgctggcggtggcggtggtgtggattattcgggcgctgaaatccccgaacggaaatgcttttcgcgacaataaccgttggcgttactaaggtattgaggggtgcgtcacaacctgaacaattttgcagacaaccgcgtaggcattgctgcgcaaatctgtcactattagcgcgttaacgaattcatcgcgctgtaccctacatacagccgaactaaaaaaaagtaagggcttcccaggtggaagccctaaacttttgccccttctgccaacttatggcagcagcaaactcgaaccctgcgtcacccggctctccagaacttcatgcgcccgccgcgcttcgctcagcggatagatctgactttcagccacgtccactttaatcaccccgctggcgatcagcgaaaacaattcactgcaggcttcctccagttcttcccggttggtgatatagccctgcagcgatgggcgagtgacgtacagggagcctttttgattcaggatccccagattaacgccggtcaccggaccggaggagttaccaaagctgaccatcaggccgcggcgctgcaggcagtccagagaggcctcccaggtatctttccccaccgagtcgtagacgacggccactttcttaccgtcggtgagcgccttgagccgctccacgatagactcctcgcgatagttaatcacctgccaggcgcccgcctctttggcgcgctgcgctttctgcgcgctgccgacggtaccgataagtttcgcccccagcgctttcgcccactgacaggctatcagccccacgccgccagcggccgcgtgaaacaggaacatctcatcaggcttaatttcataggttttgcgcagcagataccagaccgttaatcctttgaggaacgacgcggcggcctgttcgaaagagatagcgtccggcaggaccgccgctttgtcggccagcacattgtgtaccgtgctgtaggcgccgagcgccgactgggcgtacaccacccgatcgcctaccttaatatgcgtgaccccatggccaactttactgacgatgccggccgcctcggtgcccaggccgctcggcagcgacggcggcggatagaggccgctgcgaacataggtgtcgatatagttgatgccgatggctttgttttcgacctgaatctcatgttctgcgggatcgcgtggcgtgaactcaaccgcctgaagcacctccggtcccccgtgtttcgaaaattcgatgcgtgttgccatgttcgctcctgtgttgttccaagattattcagtaagcttaacagcctgcgccggcggcgacggattttcttacccgcctcaggcctgccacgcttaatgggttctttagcggcaatggctttctcgctatactgtcacgctcttttccggatcggtgaaatgttaggctatggcaggaaataaacccttcaacaaaccacagacagaaacccgcgaacgcgatccgcagctcgccgggctgaaagtcccgccgcactcgattgaagcggagcagtcggtgttgggcggtttaatgctggataacgagcgctgggacgacgtcgccgaacgcgtcgttgccgacgacttttatacccgtccgcaccgtcatatttttaccgagatggcgcgcctgcaggagtccggcagtccgattgacctgattacgctcgccgagtcgctggagcgtcaggggcagctggacagcgtgggcggcttcgcctatctggccgaactgtccaaaaacacgcccagcgcggctaacatcagcgcctatgccgacatcgtgcgcgaacgcgcggtggtgcgcgaaatgatttcggtggccaacgagatcgccgaagccggcttcgacccgcaggggcgaaccagcgaagatctgctcgacctcgccgaatcccgggttttcaaaatcgccgaaagccgggccaacaaagacgaagggccgaagaacatcgccgatgtcctcgatgccaccgtcgcccgtatcgaacagctgttccagcagccccatgacggcgtcaccggggtcaacaccggctacgacgacctcaacaaaaagaccgccggcctgcaaccgtcggatctgattatcgtcgccgcccgtccatcgatgggtaaaacgaccttcgcgatgaacctcgtggaaaacgcggcgatgctgcaggacaagccggtattaatctttagtctcgagatgccctcggaacagatcatgatgcgttctctggcctcgctgtcgcgcgtcgatcagacccgcattcgtaccggtcaactggacgacgaagactgggcgcggatctccggcaccatgggcatcctgctggaaaagcgcaatatctatatcgatgactcctccggcctgacgccgacggaggtgcgctcccgcgcgcggcgtatcgcccgcgagcacggcggcatcggactgattatgatcgactacctgcagctgatgcgcgtgccgtcgctctccgacaaccgtacccttgagattgccgaaatctcccgctcgctgaaggcgctggcgaaagagctgcaggtgccggtggtggcgctgtcgcagcttaaccgctcgctggagcagcgcgccgataagcgcccggtcaactccgacctgcgtgagtccggctctatcgaacaggatgccgacttaatcatgttcatttaccgtgatgaggtctatcacgagaacagcgatcttaaaggcatcgcggaaattatcattggtaaacaacgtaacggcccgatcggcaccgtgcgactgacctttaacggccagtggtcgcgtttcgataattatgccggtcctcagtatgatgatgagtaatccttccgccttcttttattaaggaattcaaatgcaagcggcaactgtagttatcaaccgccgcgctctgcgacacaacctgcaacgtctgcgtgaactggcgcccgccagcaaactggttgcggtagtgaaagcgaacgcctacggacacggtcttctcgagaccgcgcgaacgctgaccgacgccgacgcctttggcgtcgcccgcctggaagaggcgctgcgcctgcgagcggggggcatcgcccagccgatcctcctgctggaaggcttttttgctgcggaagacctggcggtgatcgccgcccagcgcctgcatacggcggtgcatagccccgaacagctggcggcgctggagcaagccgatctccccgagccggtgaccgtgtggatgaagctggataccggcatgcatcgcttaggggtgcgcccggaggaagccgaggcgttttatcagcgtctgagccagtgtaaaaacgtccgccagccggtgaacgtggtgagccacttcgcgcgcgccgatgagccgacctgcggcgccaccgaacgtcagctggacatcttcaccacctttaccgaaggcaagccgggcttgcgctctatcgccgcctcgggcggcattctgctgtggccgcaatcgcattacgactgggtgcgccccggaattatcctgtatggcgtgtcgccgctggacgatcgctccaccgggaaagatttcggctgccagccggtgatgaccctgacgtccagcctgattgcggtgcgcgagcataaagcaggggagcccgtcggctacggcggcacctggatcagcgaacgcgatacccgtctcggcgtggtggcgatgggctatggcgacggttatccgcgcgcggcaccgtcgggcacgccggtgctggtcaatggccgggaagtgccgattgtcggccgggtggcgatggatatgatctgcgttgacctcggaccgcaggcccaggataaggccggcgacgcggtagtgctgtggggagaggggctcccggtagagcgcatcgccgagataacgaaagtgagtgcttacgaacttattacgcgactgacctcccgcgtcgccatgaaatacttcgactaagcctctggcgtaccggatagcacagaggctgatccggtacgcaccaggcctgcggcgctcaaaaaagcggtttataccgctgcgcggtcactttcccctcaacatcctctcgacctgccgtcatatccggtttattgtgtaagaacctgccccatgtaaacctggagatacatcgcgtgtttcaaaaagttgacgcctacgccggcgaccctattctttctctgatggaacgcttcaaagaagacccgcgaagcgacaaagtcaacctgagtatcgggctgtactacaacgatgacggcattatcccgcagctgcaggcggtggcggaagcggaagcacgcctgaacgccgagccgcatggcgcctcgctgtatctgccaatggaagggttgagcggctaccgtcaggcgattgcgccgctgctgtttggcgcagagcataccgcgcttaagcaaaatcgcattgcctctattcagacggtcggcggttcgggcgcgctgaaggtcggggccgacttcctcaaacgttactttcctgagtctcatgtctgggtcagcgatccgacctgggaaaaccacatcgccatttttgaaggggctggcttcgacgtaagtacttacccctggtttgataaagccaccaacggcgtgcgctttgaggacctgctggcgacgctgcaaacgctgccggcccgcgatattgtgctgctgcacccttgctgccacaacccgaccggcgccgacctgacgccagcccagtgggaccgcgtggttgaggtattgaaagcgcgtcagttgatccccttcctcgacatcgcctaccagggctttggcggggggctggaagaggatgcctacgctattcgcgccatcgccagcgccgggatgccgatgctggtcagcaactcgttctccaaaattttctcgctgtacggggagcgcgtcggcggtctgtccgtggtctgtgaagacagcgaaaccgcgggccgcgtgctggggcagctgaaggccaccgtgcgccgcaactactccagcccgccgagctttggcgcgcaggtggtggcgacggtgctgaacgatgccgggctgaaagccacgtggcaggcggaagtggacgccatgcgcgcgcacatcctgaccatgcgccaggcgctggtcgacgcgctgcagcaggttgcccctggcagcaaagtggattacctgctcaagcagcgcgggatgttcagctataccggatttagcgcggcgcaggtggatcgtctgcgcgatgagtttggcgtctacctgattgccagcggacgcatgtgcgtggcggggttaaactcacgtaatgttcagcaggtagcgaaagcttttgccgcggtaatgtaagccgctctccagcaggttgtctctgccggtcaacgggcaggggcaacccctcggatgtgatcatcctctttttctatgacatctgcgcgaaaaaggcttttcatccatgccgccggcgggtaaggtcgggacgttgataagcatgcacattattgaaaacaataatgattgatagatttagggataaatatgcgcaaacttactctcgcccttgcggcggcttctctcctgttcacgctgaacagcgccgttgtggcgcgcgcctccacgccgcagccgctgtgggtcggcaccaacgtggcccagctggccgagcaggcgccgatccactgggtttcggtggcgcaaattgagaacagcctgctggggcggccgccgatggccgtcggctttgatatcgatgacaccgtccttttctccagtccgggtttctggcgcgggcaaaaaaccttctctcccggcagcgaggattacctgaaaaacccgcagttctgggaaaaaatgaacaatggctgggatgaattcagcatgccgaaagaggtggcgcgccaactgattgcgatgcatgtgaagcgcggggacagcatctggttcgtcaccggccgcagccagaccaaaaccgaaaccgtttctaaaaccctgcaggatgattttctcatcccggccgccaatatgaatccggtgattttcgctggcgataagcctggccagaacaccaagacccagtggctgcaggcgaagcagataaaggttttctacggcgattcggataacgatatcaccgccgcccgcgaagcgggcgcccgtggcatccgcgtgctgcgggccgccaactcctcctataagccgttgccgatggctggcgcgctgggcgaggaagtaatcgtcaattccgaatactgatgaccgcctgaacgcgataaacggcagcgacggcgctgccgtttttttatgcaaaatcaggggtggaaggttttaccttttcacgtattgctgcacacttagaaggattcattcgcaaaaggagtcaatgatgtggtatcagcaaaccctgacgcttgggccaaaatcccgcggttttcatctggtcaccgacgaaatccttggccagatccgcgggctgtccggggtgaaggttggcctgctgcacctcctgctccagcatacttccgcttccctgacgctcaacgaaaactgcgatcccaccgtccgctatgacatggagcagtattttctcaacgccgtaccggacaatgcgccgtatgaacatgactatgaaggccctgacgatatgccgtcgcacatcaaatcatcgatgcttggcgtgtcgctaatgctgccggtcgaggacgggcgcgtcaggctgggaacctggcagggcatctggctgggggagcatcggatacacggcggttcgcggcgcatcgttgcgacgctcatgggggaataaaagatgacaatttcggagttattacagtactgcatggcgaaaccgggagcagagcagagcgtccacagcgactggaaagccacgcagattaaggtctcagacgtgctgtttgccatggtgaaggaggttgaggaccagcggccggcggtcgcgctgaaggcgagtccggagctggctgagctgctgcgtcagcagcatcgcgatgtccggcccagccagcatctcaataaagcgcactggagcaccgtctatctggatggctcgctgccggattcgcaaatctactacctggtcgatgcgtcttatcagcaggcggtgaaaatgctgccggagccggtccggcagcagcttacccgctaattatttcagcatgggcttgaggaagcgcgcggtgtgcgaggcttcgcactcggcgacggtttccggcgtaccggagaccaggatttcgccgccgccgctgccgccttccgggccgagatcgacaatccagtcggcagttttaatcacatcgaggttgtgctcaatcaccacgatggtattgccctgatcgcgcagctggtgcagcacttccagcaactgctggatatcggcgaagtgcagaccggtggtcggctcatcgaggatatacagcgtctggccggtaccgcgcttggacagctcgcgcgccagcttcacgcgctgcgcctcgccgccggacagggtcgtcgccgactggccaaggcggatataggtcaggccgacgtccatcagggtttgcagcttacgcgccagcgccggtacggcatcaaagaattcacgcgcctcttcaatggtcatatccagcacttcgtggatggtcttacccttgtacttaatctccagcgtttcgcggttatagcgtttgcctttgcactggtcgcacggcacgtagatatccggcaggaagtgcatctcaaccttaatgacgccgtcaccctggcaggcttcgcagcgcccaccgcgaacgttaaagctaaagcgccccggcgtatagccgcgtgagcgagactccggtacgccggcgaacagctcgcgcaccggggtaaacaccccggtataggttgccgggttggagcgcggcgtccggccgatcgggctctggtcgatatcgatcactttatcgaaatgttccagcccctggatatcgcgatacggcgctggttcggcgatggtcgcgccgttgagctggcgctgggcaatcgggaacagggtatcgttgatcagcgtggatttacccgagccggagacgccggtgatgcaggtaaacaggcccactggcagggtcagcgttacatccttcaggttgttgccgcgcgcgccggtcagcttgaggactttttccgggttggcgggcacgcgctgtttcggcacttcaattttgcgtttaccgctcatgaactggccggtcagggattccggtaccgccataatggcctccagcggcccttccgctactacctggccgccgtgaacgccagcgccgggaccgatatcgatcacatggtcggcggcgcgaatggcgtcttcgtcgtgctcaacgacgatcaccgtgttgcctaaattacgcaggtggatcagggtgccgagcaggcgttcgttatcgcgctggtgcaggccgatagagggttcatccagcacgtacatcacgccaaccagcccggcgccaatctggcttgccagacggatacgctgggcttcgccgccggagagcgtttccgccgagcgggagagcgtcaggtagttgaggccgacgttgacgaggaatttcagacgatcgccaatctctttcagcactttttcggcgattttcgcccgctggccggagagcttcagattgttgaagaaatccatcgcatggccgatgctcatatcggagatggtcggcagcggggtgttttccacaaacacgtggcgcgcctcgcgacgcagacgcgtgccgtcgcagctggcgcacggacggttgctgatgaacttcgccagctcttcgcgcaccgcgctggattccgtctctttgtaacggcgctccatgttatgcagcacgccttcgaacggatggcggcgcaccgaggtatccccgcggtcattcatgtatttgaattcaatactttctttacctgaaccgtacagcaccactttctgcacgttggcgctgagggtgccccatggcgcttcgacgtcgaatttatagtgctccgccagcgacttcaacatctggaagtagtagaagttacgccgatcccagccgcggatggcgccgcccgccagcgacagctcgggattttgcaccacgcgatcgggatcgaaatattgctgcacgccgaggccgtcgcaggtcgggcaggcgcccgccgggttgttaaaggagaacagacgcggctccagctcgcgcatgctgtagccgcagatcgggcaggcgaagttggcggaaaacagcagttcttccgctttctcatcatccatattagccacaatggcggtcccgccggagagctccagcgcggtttcaaacgactcggccaggcgctgcgccagatcgtcgcgcaccttgaagcggtcgatgactacctcaatggtgtgcttcttctgcagctccagcttcggcggatccgacagatcgcagacctcgccgtcgatccgcgcgcggatgtagccctgactggcgaggttttccagggttttagtgtgctcgcctttgcgctctttaataatgggcgccagcagcatcaggcgcaggccttccggctgggcgaggacattatcgaccatctgactgacggtttgcgccgccagcggcacgtcgtgatccggacagcgcggttcgccgacgcgggcgtacagcagacgcagatagtcgtgaatttcggtaatagtacccaccgtcgagcgggggttgtgagaggttgatttctgttcgatggaaatcgccggcgacagcccttcgatatggtcgacgtccggcttctccatcagcgacaggaactgtcgcgcataggcggagagcgattcgacgtagcgacgctggccttcggcatacagggtgtcgaaagcgagtgaagatttgccagacccggaaagcccggtgacgacaatgagtttgtcgcgcgggataacgaggttgatgtttttgagattatgggtgcgggcgccccgaacttcgatcttatccattcacctttcccggtaggtagatacacggattgcctggtttgcttgaaggacaaacggcagaaacggctaattatgacacaatttaacctgaatgaatatacagtatcggaatgcaaattcgggtcgagtgtgcaacaatgccgtagccgggtactatctctggaatcagcctcgcagctattaaaatgctacgtggaaatggtacactcgcgcgtttacactattaagaaacgtattcaggagacacgaacatggccagcagaggcgtaaacaaggtgattctcgtcggtaatctggggcaggacccggaagtacgctacatgccaagtggcggcgctgtcgccaacttcacgctggcaacttccgaatcctggcgtgacaagcagaccggcgaaatgaaagagcagaccgagtggcaccgcgttgtgctgttcggcaaactggcggaagtcgctggtgagtatctgcgtaaaggctctcaggtgtacattgaaggccagctgcgtacccgcaagtggaccgatcaatccggtcaggacaaatacaccaccgaagtggtggtgaacgtgggcggcaccatgcagatgctgggcggccgtcagggcggcggcgcaccggcaggcggcggccagcagcagggcggttggggtcagccgcagcagccgcagggcggcaaccagttcagcggcggcgcgcagtcccgtccgcagcagcaggccccggcagcgccttccaacgaaccgccgatggacttcgacgacgacatcccgttctaaggcttgccttaggcgcactgtctgcgcagtcgaaaacagaaagccccggtttcgccggggctttttctttgttattcctgcaccgtcatttcaggatggaatttgacctacggtaacgagcgattcagatgacgggcacctgagcggtggcggctgtcgccacgctgggctgcggtttggctggctgcgccaccggctcctgccgcggtacggccgtcgctttctgtttgcgggccatgtcatcgacgatcagccgataggcgatgtaatacttatagatattgctgacgtaggttaccgtctcggcgccaattttttctgccgccatattttcgacgttaccgaaccagacgttcgggtcaaatcctcgctgtttagtcatggtgcgcaggcgggcgatacgcgccggacccgcgttataggaggcaaaggtaaacagcgctttatcgagccgggtcatgggctcatcggcatagtaccgatccatcatccagcgcatgtatttcacgccggcatggatattgggatccagctgtttaatatcgcccaccttcagctcttttccagtgctgggcatcacctgcataacgccgatggcgccgacgtggctccgtaccgactgattcagccgcgactcctggtatccctgggccgccatcagcagccagtcgacgtcgtaacgatcgccgtacttgcggaagacatctaccatcgcgaggaatttgcgtcgttccttactcgccgcggcatttttgacatatttagcatttttcaggtaacgcagcaggagagtattgcccagcgtggtgccctgacgattctttttgacgaagttgttcagtaccgtcagcagctgcgggctgtctttgcgtaccgcccaggcaatgtcgccgccgtcgcgcagcaccacgttgtcatggacctgaatttttggaaacacctgtttccagaacaacgccttatgctgatcgacgacgatcagcggaatcagcccggcgttgagcatttccagcagatcttcatcctccagcgcttccggcgccgcctccagtatcaccggtgggcgcgattcaccggcaaatcgggcgttcagcgcttgcaggctgtcgtaatagctggaggagcggcgaacaaagacggtttgaccagagagttgctccagactgtcgaccttcggtgaagccgggccggagatcagtaattctttcacgttgctgtagagcggctgggcgaaatcgacctgtgcttcccgcgagggcgtgatagtcagattggcagccgcaatatcgcctttaccttcattaagcgcgataaagagattgtcccgactgaccggcacaaaaacgatatgcagcttcaggtggcgctgtttgagctttttatccttcgctagctgtttattcagatcgttttccagcgcgataaaaatgtcgtgcgtcgccccgcgctgggtgcctttatcaataaaaaagaaggtcttgctgtaggtggttaatacccgaatggtacgacggtcgatcatgccaggcaaatcgcctctccatggccgtagcatatcgtcgatatgaatcgatagcgtgttgtcttcggctgctgccggcggcgctttttccgcctctactgccggcagcagaggagcgaataacagtgtcgcgaggcaggtgagccaggcgataaacagacgtgatagcgagtaggcgttcatggaggaatactccgcaggggatgtgattattttagcagaacggccgccgttagccgggcacgacaagggcgtaaaaaacataacaatgccgacaaatagttttctcccattttatcgcttactattaatatgtttttatctttaatttaactatggagataatatggcgaaaatgtgtgtttttaatgataaatagaaaataatgatgatgtttttattttatttctccccatctgttttgttgtaaccttttgattgttggtgtttattttgtttttcttcgagattgattattatcatcttgataatgaatctcatttttattaccgtaacacggcacattactctaataacacgctgtctggattacgctatcaaagaatagcgcgcagcgctttttctctaatgatgaaacagggcacttaattttattatgcctcatgctgttttcttattcccatgactatcgggaaggggctgacctacgccaaaatctggcgaggcgcagaggcgagtattttatcccattgttttttcaattggggaaggcgttatgcccgacagcaacagaaaacagggcatattctatgaaatacacgtctcacttcccgctggggatcgtcattcctctgctcgcctgtagcgtgccgctgcaggcggcagagaacatgaccgaacaatcgacgcctgacgagagcgccgccactgccgaaaatcacgaggagacgatggtcataaccgccgccaggcagaacctgcaggcgccgggcgtgtcgaccatcaccgcagaagagatccgcaaacatccccccgcccgcgatgtgtcggagttaattcgtacgcagcccggggtaaacctgaccggcaactctaccagcgggcagcgcggcaacaaccggcaaattgatatccgtggcatggggcccgagaatacgttggtgctggtcgatggtaaaccggtgaccagccgtaactcggtgcggtatggctggcgcggcgatcgtgactcccgcggcgataccagttgggtgccagcggagatgatcgatcatatcgatgtgatccgcggcccggcggcggcgcgctatggtaatggcgcgatgggtggggtcgtcaacatcgtgaccaaaccgaccacaccagaatggcacgggtcgtggaatacctatatgaacgctccgcagcaccgtaaagaaggggcgacgaaacgtactaactttagcctcaatggtccgctgtcggacagtgtcagcttcaatctctggggtaatctgagtaaaacccaggccgatgcgcaggatattaacgccgggcatgaagcggaacgtaccggttcctacgccggttcttatcccgccggacgtgaaggggtggtgaacaaagatattcacagtaagctgcgctgggagtttgccccgatgcaggccctggagtttgaggccggttacagccgccaaggtaatctctatgccggcgacacacaaaacaccaataccagtacgctggtgaagagtatgtacgggaaagagaccaaccgtctctaccggcaaacttacggcgtaacatggaccggcggctgggataatggcgtgaccagcaacagctatgcccagtacgaacacacccgtaactcgcgaatggatgaagggctggcgggcggtacggaagggatcttctccagtagcgagttttcagatatcgatctggccgatgtcctgctacatagtgaagtgaatattccgtttacgctgggggtcgatcagaatctgacgctggggacagaatggaatcagcagcggatgaaagatggcgtatcgacaacccaggcgctctcttacggcactatcgatggcgtatcggctaccggtcgtagcccgtactccagcgccgagatcttctcgctgtttaccgaagataatatggcgctaacggacagcaccatgctgacacccgctctgcgcttcgatcaccacagcatcgtcggcaataactggagccccgcactgaacctgtctcaggagctgacggacgactggacgctgaagctgggcattgcccgcgcttacaaggcgcctaacctctaccagttgaacccgaactatattctctacagcaacggtcaaggctgttacgccagtagttccgcctgctatctgatggggaatagcgatctgaaagcggagaccagcgttaataaagagattggtcttgagtacaagcatgatggctatcaggcggggatcacctggttccgtaacgactatcacaataagattgagtcagggtatgcggcggtgggtaccgccagcaacggcaccaccaatatctatcagtgggaaaacgtaccaaaggcgttagtggaaggcctggaaggaacgctgaatctgccggtgggggaggcggttaactggagcaataacctgacctggatgctgcagagcaagaataagacgaccggcgaccggctgtcagtgatcccgcagtttaccctgaactcgaccctaagctggcaggttcgtgaagatctctccctgcagagcacctttacctggtatggccgacagaaaccaaaacgcttcaattataagggcgaggcggtcagcggcagcgaactaaacgaagtcagcccatacagcattgtcggcctcagtgcgacctgggatgtgaacaaaaatctgagcttcaccagcgggatagataacctgtttgatatccgccactaccgggcagggaatgcgcaaacgaccggcaacgcgacgacgggagcttatctgtatggcgcgggtgccgagacctataacgaatcggggcggaccttctttatgagcgttaatactcatttctgatgatcctgatgaggagtaaaccgggtgcaacgcgacccggtttttttatttcagatgagagcggaggaggcggttataaatcgtgacaaaatcttcacgccctctacattattagctcaacatatccttttatactgatttccgtcgcgcaaggtcgttgatcccgaccgggctcgataatagcatcctgctatttcccttctgtaatatcccctgtcccccttccattcccaaccgcagcgatgcggaggagggggacctccttatttttgccgcgtgatctgatagcgatactgagtgggcgtgagcgcatgatattttttgaaggtacgattaaacgcactgagatcgtcataaccgaccatcatacaaatatcgacgattcggtaaccaggcgtcgtcagcaataaacggcgacacagcgacatgcgctgctggcggatatattccattggcgaacgatcaaaataatgacggaagagccgaaacaaatgccagggggaataaccagagatatcgctcagatcgtcgacggtcagtttcttatccagattattatcgatccacaagagcaggtcgcttaataccgattgctggagcgttttgctacgcataattgcggccaatcccataacgcagggctcctcagtgaggagccctggggtttattgaacagtgagtgtgccgtggcgaacctgataatttttttgattatcagggccaatatagtcgctggcgggttttgccagctgcagatgaccaaaggcggttgtttgctctgcatgataattttcgccgtcattcacgtcgccgcgcccgttataacgggcaatggccgggaagggatacaccggacgagtcgcgataaccgctggagcggcgtcagcgtaaggctgactgactttctgcacgccgtgaaactgcgtttgcgcatctggtttttctgtcatcggcggcaggtcggcagcggctgttgcccgtttgccggccatgatctcctgcggcgcgatgccttcctcggtccagcgcatcagcggggtaaggagatcaatttgatcgtaaccttcgccattaccgcaatgggctaccccaggcagcaggaataaccgcaggaaggtatccgttgcggcatggcccatctctgcttctacgccgcgataataggcgatagaaaaggccgggctgacggagtcatcggccagaccgtgccagaggataagcttgccgccgcgctgttgataggcatgaagattggtatttgccgcgttatagagcggcgccagttgggcgacggcgtcaaaattctgctggttaagcgggaaatcccgcatcgattggatcttctgtttttctcctggcaggagcacggattgcagagccggtagtaccatcatttccgacattgagtggccggtcggcgtctcgggcaccggccagcgtagctcggaacccagcggcagaccgcccgcgacgaactgggcgccgtggctgtcgtaagcgccgcggtagagctttttcaccacctcgatctcttcctgcgtcaggcaggtagaacggtcccgagcatcggcaggacagcgggggagccatgactcagagaactgacaggcatacggattttgcaggacaccatcctgcacgccggaaagcgtcgggcagtgagccagcacggcctggtgaatcagaggaaggcgatttttcagcaggatagcggtaccgtccgggcgctgattggcggccacattccagccgtggaagaaggagttctgaaactggaaaaaggccgctggcgcgccagcgctgataccgtcaaaatcctgcggaaagcgctgcgcttccatcaatgcttcgcgaccgccgtctgagcagcccataaagtaggcatactttggcggctggcggtaaagcgtctgcatcaccgctttggccagcacggcggtcaggtggttggcgcgccaggcaaaatcgatgcgcttttgcggatcttcggcccatgacgcatccatcatactgccatggtgccccatatcggttgctgccaccacaaactcgccgttcattgccggcaggcagccgctggcattcgacagattcaggttaatactcccgcacagtccgccacagccgacctgcaaaaaacgttgactccagcgttgggtcggcagggcaatctgcacgccaatctcaggggcgatagtggcgctcaccttgcaccagcttccctgcgcggaggtctgcatttcagtgtggttgatagtgacctttgcgccaacggccgcgctgaagtcggtagtgcttagcgcatcgcatgtcagcgcgggaagaacgatcggcagactggcgacagcctgcgtgggtgaagcgaacgataacccgaagagggcgcagaggatgatgggcaagattgtcttgagtaagcgtgtcatacgcagttccctgtggctgatgatgggaggcggcaggatggcgaaacctatgcctcaccttccctggcgaggcgccactgcttggctattgtagataacgatagactttccttgatgccttgataaggcgaccctactgtattctgctattttgaggaaaatatggagatgtttgccaacggcgtctggcggtgaattcggggtagaatgttgtgatatcagttgcataatttattcaatttctcttcattaaatctgctgggttgcaggttatttttctccctgttcctggtgatcccagagagcatcattcctaacgagatccttccccctttccattaataagaaagggggctttttattaataaaacgttcaggcaaatctaaatatagtactggtgttggccattagaacaatgcgcttcagaaaaagttccatcattaaatatatttttaaagatgctttaatatccattttttctccattttgtcgccataattgcatgtaattctgcgcctcgctcaggttattttctgtcgcatattttagagatgcatcctgaacaaataagctcaacgccagcagaacactgctattgctcattatctcgtagacgacacattcatgttaaaaaagactcatatcatcagcggattattgatcgcccctttaacgttatatgccgcaacatcatatcaagttgatgatatccgttttgaagggctacagcgcgtgaccgtcggggcggcgctattaagtatgccattgcacgcgggagatgcggtgacgccagaagatgtcagcgaggcagtgcgcgcgctgtatgcgagcggcaatttcgaaaatgtgcagatcctgcgcgatgggaaaacgctggtggtgcaggttaaggaacggcccactattgccagcgtcagtttttccgggaataaggcagtgaaggatgatgcgctaaaggaaaatctcaccgcgtccggtatttctgcaggtagtgcactggatcgaaattcgcttagcgaaatagaaaaggggttgcaggatttctattacagcgcggggaaatacagtgcgcaggttcacgcggtggtgaccccgttaccgcgtaatcgcgttgacttaacgttcgtttttcaggaaggcatctcggcgaaaatcgcacaaataaacattatcggtaatcaggcgtttcgggaagagacgctcctggaccagcttcagctacgtgataatgtgccgtggtggaacgtggtagccgataaaaaataccagaagcagaagctggaagccgatctggaaacgctgcgcagtttttatctcgatcgcggctatgcgcgctttgctatcgagtccacgcaggtcagtatgacgccagataaaaaatccctgtatatcactatcgccctcaatgaaggcgaacgttatcgggtcgaccgaactcaggtgatgggcgatctggctcagcatgggccggagatcgaggcgcttgcccagccgctggcgggggcatggtatagcggggcgcaagtcaccacggttgaaaatgagatcaaaaagcactttggtaagtatggttatgcctggccgcaggtgacgtccacgccggaaatcgatgatgcgcatcaccgcgtggtgctgcatattcaggtcaacgcgggccgccgctactcggtacgccagatccgcttttccggtaacgacacctcccgggacgcggtgctgcgtcgtgaaatgcgccaaatggaaggggcgtggctcaacaacgaaaaagtcgatcaagggaaggtacgtcttgatcgaacgggtttttttgagaacgttgaacagcagatcgttccggtcaatggaacggcggatcaggtcgatgtggtctacaaggtgaaggagcgcaacaccggctcattcaatgtgggcctgggatttggtacggacagcggcgtgagctatcagcttggcgtgacgcaggataactggctgggaacgggtaatagcgttagcttcaatgggacgcgcaacagctaccagtcttatcttgaactgggggcgacgaacccgtggtttaccgtagatggcatcagcctgggcggaaagattttttataacagctatgatgcttctgatgcggatgccgggagctataaccagcagagctatggtttaggtagtacgctagggtttcccattagcgaaaataactccctgaacctgggactggattatgtccataatcgcctgaccaatatggatccggagctgacgacctggcgctacctcagctctcggggaatcgagcccagcgtggtgacgaaagatggcgacagcggcgcaaaatatagcgccaacgattattttgtgagtcttggatggggctacaacgatctcgatcgcggcttcttcccgcgtgcgggaaacaagagcagcctgagcggtaaagtgacgctccccggttcggataatagctactacaaactctcttttgacaccgcccagtatctgccgctgagcgagaacaagcgctgggtctggatggaacgcctgcgcgcaggctatgccggcgggttagacggcaaaagtgtgccgttctacgataacttttacgcaggcggttcgtcgtcagtgcgcggattttcttctaacactattgggcctaaagcggcctattaccgctgtaacggtagcgaaagcagctatagcgcctgcccgctggacgcctcgtctgatgcggtcggcgggaatgccatggcggtgctgaacagcgaatttatcattccaaccccctttgtgaatgataagtacgccgatagtctgcgaacctcgctgtttgttgacgcggggacggtctggagtacatcctggcacaacaccgcgcagacgctggcggcagggatccctgactacggcgatccgagtcatattcgtctctccgcggggattgccgtgcagtggatgtctcccctcggtccactggtcttctcctgggcagagccgtttaaaaagtacgatggtgataaagcagaacagtttcagtttaatatcggcaaaacctggtagggctccaacggggcctgatagaccggcgtggctatattctgtggactgtcctccgacatagcgattgagcagaatatactcaaccgctatgtcgatattatcgctaaggaatgcgatctggcgggacacccgcgacatttacccgagcgcggtctgcgggcctcgcggacctggtgacgtacgacgaggtaaccacgcaataaatagctgcctgctatggtcctctcttcttgccaaaccgcgggtaatactcagtgctgcatcatctaataccaatggctgaggcctcatccagagggactaagacgtattgtcaattaagtttatattatcttattttttattgtattttcttttttaaggttaatttggctgtttttcatcaggcctaaccataaatttagagagggagatgaaacgttactaataatggagtatgttgttaggaattgtcttaaatcacataattgtcaggggtgcttgcgatttataacaatgaatgctatcactatatattnnnnnnnnnnnnnnnnnnnnnnnnnnnnnnnnnnnngaaatggactattcttaataccctgatctgcccgcaatctggtatcgccttctcggctatatccagtctgcgtttcttgaaatttatcatgtggtacgaggctgatgtaatcctgttgcccggtgagtcgataagactctattcctcgagagttttaattaatgaccagtatcattcattaaaaatctataatattacggtgtacgacgaggcgcagtgggaaaaattacgtgagcgaccatcgtgcccttaccatgccggtggcgagcggtctgactcctgtttttaccagtccttttgcacgattaagcgttgcccgaataatattccccgcagtgaaccctggcgttagccagtccacgccgccggtcagacaccggcggcgtgacctcatttcgccagcagggcggccagtcgaggctggacgcttgcgcagccggccagcacgaggttgcctcgccgcaggcccgcattggcgagaaacgcattgcacgttccgcccgcctcctcaatcaatagcatgcctgccagcgcatcccagctgttcatatgcgcttcataataggcgtggagctgaccggcggcgacatgcgccagcatcagggcgcccgcgccaaaacggcgatactccagaccggcgtcgagcagcgtgtcgatggcccgggcgtagtcgctggccggggcccggctggagcgccccatgccgatcaccaccgcatcgggctccggctcgcgtagcgtcaggcgccgaccgttgagatacgcgccttcgccgcgggcggcgaagaaaaattcatcgcgatcgggggcgtaaatgatgccgagcgacagctcgccctggcacactcgcgccagtgagatgcaccagtaatccatgccgaggataaagttggtggtgccatcgacaggatccagcacccagacggtctggtcgtcgccttcaaaaccgctctcctcgccgaggaaaccctcctcgggaaagtgggcctgcagccagcctttaatctcttgttctaccgcgagatccgcctgcgacacaaagtcctggcgcgcttttttatcgacctgtaatcccgcatcgcgcagcgcctgggcgtgggcgcctgcctggcgaatcaaggcgcataatgactctcgttgtgcttccgtcatagtcctgctctcagataacaaagggcgacgtgcgccggtgaattaaggttacctccacccaggtggtgcgtgaaggttgcgaagggtcggcggcgcgctccagaagccgggcgagcgcctggcgggcgatcgccgccacatcctgatgtagcgtggtgagctgatagctatattgcgcggtcgtcggcgtgttatcaaaaccaatcagctgaaaatccgccggagcctctctgccgcgctggcgcattccatcgagaaagccacatgcaagctgggcgttggcgcagaagatcccctccagcgcctcgtcggcgagcgccgcagcctgtaacccgcccgcgtaaccttcttgctgacaggcgaggatcgccaggtggcgttcgacgtccactccgcgcgtttgcagcgcccggccgaacgcttccccgcgcatgcggccggcccaggtggaaggatggtggttgagccagccaaagcgctgacagccgctgcgcagcagttggtcggcggccagttcggcgccggcggcgttgtcagaacaaacgtaatccacgccggggattgtcggctgacgattaatgcccacgaccggaatatgctgctggacgcactcgttcaccagcgcctccggcggctggccggaggtgacgataacgccggagacgcgaaactgagcgaaacggcgcaaggtctgcgccagatcctgctcgctgtggatctcgctcaccagcgcctgaaagccctggcgctggatctcgttaagcagcgcatcaagcagggtactgcgaaaaggatcgctgatgcgcgagacgatcacgccgattaagtggctgcgctggcggttcagcccctgggcgaggaagttaacctgataccccagctcttcggcggcgcgcagtacccgcgcccgggcgtcgggagagatgctgccgttgttgctcaacgcccgggacaccactgcccgggagacgcccgctcgccgggcaacatcctgggcggtgacgctgggtttgcgtgggttcataggaggtacgtctcgtcagtgggcgtgggacgcggcagcgttaaggtgagtccatcccgggaaacgaataagcccggccacggctgacaggcctgctttagcgccgacagggaagcatcctcgcagtgatagagccccagcgccgggagctgcagcgttctgaacagcatcaggcaggaggggaaatcgccatgcgaggcgtcatcgtccagggctgctaccgaggcgcactcctgaaacgccagcccggcgccggccatcagggctatcgagtcggcggtcggtcggccatcgccgctgtaaaacagcgtctgcccggcaatggtgatgcggatggcgcgattactcagctcatgctgggtgggggcagtgcggatctgccagtcctgccacgtccaggcttcgcggcattcctgccagtcgatggtgaaaccaaggtccgcctgcggccagttcgccagcgcggccagttgcatgagcaccggctgctgcgccggctggcagtagataatgactggcttctgacgggaataacttttccagtggttcagtagcgccgtcaggccggtgcagtggtccgggtgaacgtgggtgaagtagatcgcgtcgatatcgttgacctcgccgccgcgctgccagagcgcgcggggaacggtggggccgcagtcgattaaccactgtttgttgtccgcatcgatcacccgcagcgcggaggtattttgcgtgcaggaaaaggcgctcccgcagccaagcacatctattttcatttaccctcgccaaaattttttgccgcttaattaaattgtcataaatacccgacaaagtaggctcatatcatgtcgagtcaacgttgcattttttttacagtcaaatgaacacgtgttcaccttgctaaaaaaaatgccgcagcagcgctttcaggtagcgaatatgagttatttacagatctccggccttaaaattagttatggcgataaggtggttttacataatatcgatctggcggtagagcagggagagatgattgctctactgggcccgtcgggatgcggaaaaaccacgctgctgaacgccctctgcggctttattccggtgcaaagcggcgaggtggctattgccagccgaacgatcactcatcttgcgccggagcagcgcaatatcaccatggtatttcaaagctacgccctgtggccgcacctgacggtagcgcgcaatatcggctatggcctgaagctgcgcaaatggcgcggggcggatatcgcgcggcgggtggcggagctgctgcgaatagtcaatctcgaagggcttggcgaggtgaaagtgaccgaactgtcgggcggccagcggcagcgggtggcgctggcgagagccctggccatagagccccaggtgctggtgttggatgagccgttatctaatctggatgccaaagtgcgcctgaatgtgcgccatgaaattaaatctctgcaaaagagactggggttcacgtcattaattgtcacccacgatcagcaggaagccttagtgatggcggaccgcattgcggtattaaatcaggggcgtattgaacaaaccggcacgccggaagaaatatatcaacgccccgcgacgcccttcgtcgctgattttatgggggccgataataaaataatttccggtgaattatccgctgccgcaatatccggtttatctgccgctcagcagggtgacaacgttatttattttcgcagcgccgatgccgcgctcgctgaattaacgcagcctgcgccgcaggaggggctggctctggaaggcgtggtggagcaaagcgcgtttctgggcaatctgtatcgtcacagcgtgcgctgccatgaccgcctgctgctggcggatgccgcgcagtgctggccgacaaaaagccgcgttcggctccatgtgccaacgccggccctgcatatttttcctttaccactatcacagtgatatcagcgtgttcattctggggacaatccatgttgactaagacgaaagcagcgatcgtaacgaccctcttcctgagccttggcgcacaggccgacaccattctcaacgtcgccaccgcgggcgatcagaatatggtggattatgtaaaaacctggctggggccaaaatttgaagccgctcatcccggcgtcaaggtgcgggtgatcggtaccggccccggcgacgccgggtcgaataaaattagcgagaagctaacggcccagcaggagagcggcgcgcagcagtgggatatcgacgtcgcggtagtgcaccagaaggcgggcggtgagcaggtggcaaagggattgctgcaaaaataccgtcaggatattcagaccggcggcatggtgagttcgccgagcgccacccaggcgctgggcgttaacgttgacggatacgtgatgccgatgttcttaagccagaccgctatcgcctggaacagcgatctggtcactaccccgccggcgtcgtatgacgagctggtggcctggacgcagaaacacccgcaggcttttggctataacggcatcaagaatggcatgtccggcgtcagctttgtggtgggctggatctacgcctacgggaccgacgcccagcgtctctccgccgggccctatgataaaagcgtcgaaaaaagctggcagcaggcctatgagaagctaaaggcgttcaataaaaacgtaactttcaccccgggcaacgccgggacgctcgatatgctgagccggggggaaatcgccatgggcccggtgtgggtcgatatgttctatagctggaaagatcagggcaagctgccgccgtcgatcaagcttgctttactggcgccgggcatgcctggccagccgatgtattacgtcatcccggcgaaggcggcgaatccgcagctggcgcgcgactttatcgcgctggccaccagcccggaagtgcaggcgcaggggatcgtcaagcagttcaactggtatccgggcatcgacgccgggcaggtgaagccgaagctggatacggcgacctggcaaaagctgtttgccgaaatctcgccggaagcgctggcgaagtatggcaaaagcttcccgatcgccccctactttgacgatatcaaagagggttacgaaagccaggtggctaattaaacctttttccagcccgggccgccgtcccgggcgcttgcttgtgctgacgccaggtttattatgtccagttcattaaaatatctgctgctggttgccccggcggcgctgatgatcgcgatcctgtttttgtatccgctggggttttcgctggtctcggcgtttaccgcgccgggacagccgttcaccctcgatcacttccgcaaggtctatgcgctctacgccagcgatgtgctcttttcgctgcttattgtgctgatctcggtggcgctgttagcgctgctcgccattaccctgtcggcagtgattgcgctgtcaccctgccgacccgttgtgcgtttgctgggttttttgtatcgcctgccgctgtttattccttttatcgttgttgcccagatgatgcgcacttttctcgccaaaaatggcctgatgaacaatgcgctggtggcggccgacctggtcacgccgctggagacgctctcctggctgggatggaaagggatagtgatcacctttgtctggaagcaactggcctttgccacgctgctgatctgcggggcgatggcggcgctggagtcgtcgcagatccttgctgcacgtaatcttggcgcctcccggccgcggatcctgttcgatatcatgctgccgcaggtcctgccgactatcggcgtggcgctggtgctgtcgacggtgaccatgatgtcggtgctgtcggtaccgttgatgatcggcgtgggaaccccgacgatgctaaccgtggatatggcgtttcgcgtcaattcctatggtgattacgcggtggcgaatgcgcttggcgtggtgtcgctggcgatctgcggcgcgctgtcgtggttttacctgcgccacagcctgcagcaaaaaggcggtgaatcatgaaagcgctggccctcgtatcaacctcggcatggtgggtgaaagggcgccgtaaagtgcgcgccagtccggtgctgcagaccctgctgctgctgtttatgctgctggcgatgtttggtccgctgctgaacctgttgatctggaccgtagcggaaagctggtattttccccattcgctgcccagccggtgggggctgaagtactggtatcaggttttcaatccatacagcgatgtctccagctcgctgttaaccagcgtgctgatcgctctgttatcggtgggggtctgtttgctgatttccgtacccgccggctatgcgctttcccggcggaaaatgccattacggatgctgttcatgctgctatttcttatcccgcaggcctttcctaacctgacggtatacatgaatgttgcccgattgttttatcagtggggattgaacggcagtatcgcaggggtggtgctggtgcatagcgtccacggcctgatgtattcggtgtggatctgtgtagccgcgttttcagccatcgacccgctgctggcgcgggcgtcgcgtaaccttggcgccgggccagtgtataccttctggcacattgtgctgccgcaggcggcgccggggatcgttgccgccagcatctttgtttttctggagtcgctggatgagtttaccggcactttcttcgtcggggcgccggatatcaccacgctgccgctgctgctctataacgccagcatgtcgggtaactatcaggtctcgtcgattaccgcgctgattttgctggccccatcgctgctctttatggtggtgatccataaatttatgcgtccggagatgatggcgaaattagggaaataagggctgcagaaaacgaaaaagcttcccgtcgggaagctttttaacctcaggtcatcatcattggccattctggcggtgtctgactcatgacttcaatcatcacatctttgatattgccccagattttggcaatatcgagcagggtgataccgagcaaaccggtggcgaaccagcaggcggcggccaggccgaggcagctgcagatcaccgccagaccggcgtaatcgcttttgcgaagctgaatattcagtgagctggcgagaaacatcagtaccgcgctcaccaggggccagcgcaataatacgacactggtagtaatggaagccattaacctatcctcaaagaaagtcgggagccatggacgacctggcgcgactgacgatggcatagcgctctggtctcaactggcgtactagagagtgatgaaacgccatttctgtttcatcaacttgtgtgaactatatcacacttggcgctttattcaccagtcaaaaaatgagcttttgctgcgtttaataactatgaagtttgtgtggatattggtgagcaatcccgggaagcatattttcattcactgcctaatgattattattctgcgggttttattacctgttcttgtttattacacggagaaaccgagtcagatgcgcgtctattcttaatcttgccggaatatcttccgaatacctgataaataagtattattcatcaccatcagaggtaaaactgacgctcgtgagggctgtcggatgtcagctgatgtctatcgcaatcgcgattgctaacgtgttcgggctaccttaattaaggcatatcgcatggatgtaagcgtaaatgggtgacagtgcgccgcataaggcgctaagactcatcggaacaggtttggttattttattgccagtggtgctggcattgtggtttgcccagctgcgggctaaagccgaaaccattgatcaattacactcattttcgcagctggcgctgcaaaaaacggaaatggtcatccgggaagcggatcaggctcgggctaaagccagccagtatcgcggtgagttgtgttcagcggatcaccagcgttatttactgcatattgtgcgcggcctgctgtatgtggaagatctgatctacgctaacggccagcgctttatctgttcaacgtccgttcatcagcaaaccggctggcggatgccggcggctaattacaccaaaaagccggatgtcgcgatttactattaccgggacacgccgttttatccgggctttgccatgaattatatgcagaaggggccctatgttgtggtggttaatcccttctcgtacagctcggtgatcgccagcgaccgcgatttagcctatggcgttttcgataccaaaaccaacctctttttctcggtaagtaacaatgtcgagcccgcggaactccatgcgttaattcgcgaaggcgataccttttttaatcagaatggccgggtgtatacgatcgcccgctccgctattcgccccatcgccgtcattatgtccacctcgcgggccagctactatcacaacttttgtgaccaggccagtctgacgctgccgctggggataatttgcagtattttactggtgctggtgtggtcgcgcacccgccgacagtatcactcgccgcgcaatatgctgcagcgggctctgagctgccgccagctgcgcctgcactaccagccgattatcgatattaaaaataaccgctgcgttggggcggaagcgctgctgcgctggcctgggtttgacggtccggtgatgaacccggcggagtttattccgctggcggaaaatgaaggcatgattgcccaggtcacggactacgtggtggatgaactgttttatgaaatgggtgagtttctggccagccatccacagttgtatatagccatcaatctctctgcgtcggatttccattcggcgcggctgatttcacagatcagtgagaaagcgcacagctatgcggtctgtatcggacaaatcaaaatcgaagtgaccgagcgcgggtttatcgacgtaccgaagaccacgccggtgatccaggcgttccgcgaagcaggctatgaaattgccatcgacgatttcggcaccggctactcgaatctgcataatctgcacgcgctgaacgtcgatatccttaaaatcgataaaaccttcgtcgatacgctcaccaccaacaacaccagccacctgattgctgagcatatcatcgagatggcgcgcgggttgcggttaaagacgattgcagaaggcgtggagacgccggagcaggtaagctggctctacaagcgcggcgtacagtattgccagggctggctgtttgcgaaagcgatgccggcgcgggagtttatgcagtggttagccaatgctcccgcgcccgcgaacgtgcctcagccgccgcgtcacgcggagatctgatggcgatagtcgctgggagtgcggtcaaactcgcggcggaacacccgtgagaaggtttgctgcgagacgtagcccagatccatggcgatatcaaagatcggccgctgggtggttcgcaacgcttccgccgccagcagcaggcggcgctggcgaatatagtcccccagcgtctgatgcatcacggtacggaacatccgctgcaggtaccacttcgagtatcctgactttctggcgactatatcaatgttaagtggttgatcgatatgttcatcaatccattcaatcaaagtttgaataatatcctgatgggacataaagcggcctctctcaattctcgattcgtcgttttgtctgcaggcgagtataattcctcaagttaacttgaggtaaagcgctttatggaaaagaaatcaccccgcatcaaaatgctgttgacgcctggagaagtggcaaaacgaaccggcgtggcggtctcggccctccatttttatgagagtaaaggattgatccacagtcagcggaatgccggcaatcagcggcgctaccggcgtgacgttctgcgcgcggtggcgattatcaaaattgcgcaacgtattggcatcccgctggccactatcggcgacgcgtttggcgtgctgccggaagggcacaatctcagcgcaaaagagtggaagatgctgtcatcgcagtggcgtgaggagctggatcggcgcattcataccctgacggcgctacgcgaccagctcgacggctgtatcggctgcggctgtttatcgcgacgcgactgcccgctgcgcaacccgggcgataaactgggggaagagggaaccggcgcccggctgctggaagacgagtgataaaactaaagcgccacaactgggcgctttagttgttttccggtcttggtctttcgcattatctcgctggttcgcgagagggtttcccccgacgtcgacgtccctcagtattgcgcaatctgttgatggaggttccggtttgcgtcgacactttaactatggcatctgccgtcgctttttcctcactattttgctgaaattttcccggcaatgagcgcctgtttctatagttaatttgaacaaactacgggagaggctcatgctgacggtacatcatcttaatcaatcacgatcgcaacgcgtactgtgggcactggaagagctgcagctgccttatcagatagtccgctatcagcgggagaaaacgatgctggcgccggcggcgctgaaaaaaatccatccgttgggcaaatcaccggtactggaagataacggctatgtgctggcggagtccggggcgatcctcgagtatttgcaggaaacctgggacagcggcgggttgttgaagccgcagggaattgacgacaaactgcagtaccgcttctggctgcactatgccgaaggctcgctgatgccgctgctgttaatgaagctggtgttcgccagccttggcaaaccccctgtgccctttggcgttcgctcgctgggttcgctgctgggcaaggggatacagaaaacgtggctcgatccgcagctggccacccatgcgcggttcattgacgaccatcttgccgcgcggccatggttcgctggcgagcggctgagcatggccgatatccagatgagcttcccggtgatggcattgttggcgcgcggcggcatgcatgaccttgtccatatcgaggcctggcgtcagcgagtggaacagcgaccggcctggcaacgcgccatcgagcgcggcggccccttcaccttacccggcgcctgagatatcagcggatccgatgacgtcgataaatgaaagcaactcactaaaaaattgttagcggattgcgcatagacgataacgtttgcgcatcggctggtcattttctgttcgtcataagcgaaatttagcgaaatacgataaacatcggttgaaaagggttatctaaaggccggataatcgtttgcctttctgtttcgctcccccttttttctgctgtccgggggaggcgataaggttgaccaccgtagtgtatgcgcggagttaaacgtttgcttttttgcggcccccctggcgctgcgattcggtacatggagatcgcgtttaactggcagtggacggtccaccacgcatatcaacgaacgataaaaattttcaggggaagttttctatgtctacgccttcagcgcgtaccggcggttcattggacgcctggtttaaaatttcggcgcgcggcagcaccgtgcgtcaggagattgttgcaggtcttactacctttctggcgatggtgtactccgtcatcgtggtgccgggcatgctcggtaaagcgggcttcccgccggccgcggtgtttgtctcgacctgtctggtagcgggcgttggctcgctggcgatgggattatgggcgaatctgccgatggcgatcggttgcgctatctcgttgaccgccttcaccgccttcagcctggtgctggggcagcagatcagtattccggtagccctcggcgcagtattcctgatgggggtcctgtttacggtgatctcggcaaccggcatccgcagctggatcttgcgtaacctgccgcagggcgtggcgcacggtaccgggatcggcattggcctgttcctgctgctgatcgccgccaacggcgttggtctggtgatcaaaaacccgctggacggtttgccggtggcgttgggcaactttgacagtttcccggtggtgatgtcgctgattggcctcgcggtgatcattggtctggaaaaaatgaaggtgccgggcggcattctgctgaccattatcggcgtgtcgattgtcggcctgattttcgatcccaacgtccatttctccggcattttcgctatgccatccctgagcgatggccagggtaattccctgatcggcagcctggatatcgtcggcgcgctcaacccggtcgtgctgccaagcgtgctggcgctggtgatgacggcggtctttgacgccaccggtaccatccgcgcggtggctggccaggcgaacctgctggataaggacggacagatcatcaacggcggtaaagcgctgaccaccgactccctgagcagcgtcttctccggtttagtcggggcggcgccggcggcggtttatatcgaatcggcggcgggtaccgcggccggtggtaaaaccggtctgaccgcggtgacggtcggtgtcctgttcctgctgatcctgttcctctccccgctctcttatctggtgccggcctacgcgaccgcgccggcgctgatgtacgttggcctgctgatgctgagcaacgtggcgaaaatcgatttcaatgactttgttgacgcgatggctggcctgatcaccgcggtgtttatcgtgctgacctgtaacatcgtgacgggcatcatgatcggtttcgcgaccctggttattggccgtctggtctccggcgagtggcgcaaactgaacctcggcacggtgattatcgctgtggcgctggtggtgttctacgccggcggctgggcgatttaaacccttcgtgctcctcacgggcggctcaggccgcccgttttatttttaagccacatcctgtttccatttgcgttaatctgggtagcgtatgattcacaggcacgacgccttacaggtataaaagaaaacgcagcaaacagggaacacatggaaatattctttaccatcctcatcatgacccttgtggtctcactctccggggtagtgacgcgcgtactgccctttcaggttccacttccactgatgcaaatcgccattggcgcgcttctggcgtggccgacctttggtttgcacgttgaatttgatccagagctgtttctggtactgtttatcccgccgctgctattcgccgacggctggaaaacgccaacccgcgaatttattgaacacgggcgcgagatcctcggcctggcgctagcgctggtggtcgtgacggtggtcggcatcggctttctgatctactggattgtgccgggcattccgctgatccctgcgttcgcgctggcggccgtgctgtcgccgaccgacgccgtggcgctttcgggcatcgttggggaagggcggataccgaagaaaatcatgggcattctgcagggggaggcgctaatgaacgacgcctccggcctggtctcgctcaagtttgccgtcgcggtggcgatgggcaccatggtctttaccgttggcggcgccaccgtagaatttctgaaggtggcgattggcggcgtgctggccgggtttgtggtgagctggtcgtatggccgctcgatgcgcttcctcagccgctggggcggggatgaacccgccacgcagattgtcctgctgttcctgctgccgtttgcctcctatctgattgccgaacatatcggtgtctccggcatcctggcggcggtagcggcggggatgaccatcacccgttccggcgtgatgcgcaccgcgcccttggccatgcgcctgcgcgccaacagcacctgggcaatgttggagtttgtcttcaacggcatggtcttcctgttgttgggcctgcagctgccggatatcctctccagttcgctggtagcggcggaggccgaccccaacgttgagacctggatgctgtttaccgacattatcctgatctatgccgcgctgatgctggtgcgttttggctggctgtggtcgatgcgtaagctcagtcagcgcttcctgaagaagaagccgatggagtttggctcctggaccacgcgcgagctgctgatctcctccgttgccggggtgcgcggggcgattaccctcgccggtgtgctctccattcctctgctgctgccggacgggaatgtctttccggcgcgctatgagctgattttcctcgccgccggggtgatcctgttctcgctgttcgtcggggtgattgcgctgccgatcctgctacgtcacattgaatcgagcgataatgtgcagcagcggaaagaggagcgtctggcgcgcgcggcaacggctgacgtggcgattgtggcgatccagaagatggaagagcgtctggcggcggataccaaagagaatatcgatacccagctgctgaccgaagtcagttcgcgggtgatcggtaacctgcgccggcgcgccgatgggcgtaacgacgtggaaacctctatgctcgaagagagtctggaacgccgcttccgcctggcggcgctgcgctctgagcgcggcgagctgtatcatctgcgcgccacccggcagatcagtaacgagacgctacagaagctgctccacgatctcgacctgctggaagcgctgttaatcgaagatcaataacctgtaatccggatagcgcgacgcttattcggactactggcgagactgcagtaaatgtgtagccccggtaagcgttagcgcgaccgggggaaacccgggcagcggcgcaagcgcctgacccgggctaccccttcccttgcggaacgcgttgtcaccagggaattattccagccagaacgctttgctgcacgccagccaggcctcagcgctgcgcgacatatatacgccttcccgccaaatcatccccagctcccagcgcagctcgctttgcaacgggatccagcaaaaattctgccggtcgagacgctggcaaatcggttccggcaggatcgctacgccaatgcccgcctgcaccatggcggcgagaaaatcccactggccgctgcgcaccgcgatacgtggcttcacgtcatgctcggcaaacagccgcatcagctgctggctaagggcaaattcctcgttgtagataaccagcggatgcgacgccagctcggccggcgagagcgaggttttaccttcccactccgcggtccttggcgtcaggacgcacagcgggtgattgaacaacggcagaatggtgaggctgctatcctcctcgacaggcagggcggtcatcgccatatcaagttcgccattgctgaccgcctgctggaccgtcaggccgccaaactcggcgatcttcagctcgacgcccggatagcgctggcggaagcgactgatcggctcggccatcagcatcccgaccatcggcggaatgccaagccgcagcacccctttatgcaggtggttgatatcgctcagctctgactccagctggctgaactcgcccaagatcgcctggccgcgttcaaaaacgacgcgcccggtatcggtgagcagtagtttgcggccgtcgcggatcaatagcgtgcagttcagctcatcttcgagattcttgagcatcttgctgatggtgggctgtgtgacaaacagcttttccgccgcgcgagtaaaactctgctgacgaaccacttcaacgaaatagcgcagcgttcggatatccataattattccctgagactatacctgcgatgattttaattcatttctgtccgcttcggcggctctctatactgctcgcctgacttctttttttcaggactatcgcacatggccttcgcgccagctcgcgttgcccccgccgtggcgcaacgacttcagatcccggtacaggtacttctctacgtcgggttattcatcttcgcacaatatctggtgaacaggtggcaggtaccgctgccggctaacctggtcggcatggtgatgctcctgctgctgatcgtctgccgggtgataccggtaagctgggtgcgcgccggcgcccgctggctgctggcggagatgctgctgtttttcgtcccggcagtggtcgcggtggtgaactacgcccagctgttgatggtcgatggttggcggatttttctggtgattgccttaagcacgctgatggtgctaggcgccaccgcctgggtcgttgacaaggtctatcgttacgaagtgggcaggttaaaaaaatgagcgatgccgtactgagtatcctgtgcctggtggcgacgctggtcctctattacgccaacaaaaaactgtatcgccgttttcataaactccctctgatgccgctggtgttcacgccgatcctgctggtgctgattctggtggtaggccacatctcttatcagagctatatgggagagacccactggctgctgtggctgctgggcccggcgaccatcgcctttgccgttccggtgtatgaaaatgtcgcggtgattaaacgccactggatgtcgctcagcgccggggtggtgacggcggtagtggtggctgtcaccagttccgtatggctggcgcgcgggtttatgttgtctgatgaaattcagcgtagcctggcggtgcgctcggtgaccacgccctttgcgctggcggcggcgaaaccgctcggcggacaacccgatctggtggcgctgtttgtggtgatcaccggcgtgtttggcatggcggtgggagatatgctgttcttacgtcttgctatccgggaggggatggcgaaaggagccgggttcggcgcggcttcccatggtgcgggaacggcgcgctcgtatgagctgggccagcaggagggcgtggtggccagcctggtgatgatgctgtcaggcgtagtagtggtgctggctgcgccggtcgtccgctggctgctgttttaacattatcgccagagtgaatgttaataaatattgaggagaggaatagctatcggctattccctgtttttgttattgatgcatttaacggttcatcataaaagattaagccaattcttatatcagcactgactttgtaactaaatgtttctctgcatgcccgtatttaattatggggtaaatatnnnnnnnnnnnnnnnnnnnnnnnnnnnnnnnnnnnnnnnnnnnnnnnnnnnnnnnnnnnnnnnnnnnnnnnnnnnnnnnnnnnnnnnnnnnnnnnnnnnnnnnnnnnnnnnnnnnnnnnnnnnnnnnnnngttcttacctcatgctagttattatttttacgcgagcttgtattattgaatggattcaaatgctggtcgtttatttatgaataatattaattgtcataaaccatatgtcatgtaaatacatgcatgacgccgcgctgcttgaatttcattctctaatatcgctgcataaaacaattgacggactgattgtcgtttataatggatatgggaataaatatgaagatgagtaaaaaatttctggcgggtgccctgattttctctgcctgcagcgcgctgtctaccgttgcgcaggctgataacaccattacctttaatggtattgtttccgataccacctgtacggcgaccattgatggcggtgtaacggctattgatatgggcaccacctcagtggcggatctgaaagcgtataccttcggcgctgccaagaacttctcctttagcttagctgattgcccgaccgcggaagaaggtggcaacagtatcgcccgcgtcacttttggcggtgtttccgataccgcgaacagcgattattttaaaaaccaggcaactgatgagccggcaaccggcgtcgctgtggcccttttcgacgaagcgggcaatgtgatgaagaataacgaagagggttctgatgttgatatctcttcgggtgcagcaaccattccgttcaccgttaaaatggtgaaatcgggtgatgccgatccgacgaaaggtaccgttcagacaaccgtgacttataacgtgacctatcattaattcggcttcttgttgaatggagaaaggggaatcgcctgctattccccttaaattaaacatatgagatatcctttttttgcgatcggtttattgctgtcttcttccttcgcgcaggccagcgtggtcgttggcggtacgcgtctggtttttgatggtacgaaaaataacgctgtaataacggttgagaataaagatcagaacagcaatatcgttcagtcctggctctcggtggttgatgcagcctcacccgccaaagacgcatttattattacgccgccgctgtttcgtctcaaagccggggagaaaggatttgtccgcgtagttcgatcaggaaagaaattacccgacgatcgcgagtcgatgttttggctcaatattaaagggatcccggcaacagaatatgtacctgataaaaatgtcgtacagtttgcgattaattcgaaaataaaattgatttatcgacccgctgcgttaaaaggtaatacaccggaagcgtacgctgaaaaattacagtgggggaaagaggggacgtcggtgacggtaaaaaataactcaccgctgtatatgaatttctcacaggttagccttaacggtaaaaatatttctggcgcatggtttgctgccccgttttccactttaaaaatacccgtgaagagtagcctgtcggcgacaggaaaaaaagagatcacatggagcgtgattaatgattatggtatgtcagggaagaaatataccgctatcattcagtagcgttgagctgctattttcaactaaaagtatctgcgtcgctattattctgtgcctaagtactctaccctctcgcgcggaggccggcgaatatttcaacccaaatttactcgaagtcgctgagagtcctgcggcttcggttgatctatcctatttttcgcaagatggcataccgccgggcacctatcacctggatgtttacatcaacgataagtacgtcagttcagactcgctgacttttcaggaaattagccatgacgcaggcgcgactgcttctccctgcctgtccgcggagtatctgaattcatggttgattaataccaccgcctatccgcagttgttcgaggcaggggaaacctgcgcccggctgtcggcgatccccgggatgacgttctcggtatctcttgcccagcagcgcattgattttaccgtgccgcaggccgccatgctgaatcgccccagagactatattcccgagagccagtggcaacaggggatcaatgccggtcttctcaactatagcgtcaccgggcagcgtaatgcgccgcggcataacggcgccactatcgacagtcagttcgtcagcctgcagccagggctgaatctgggaccatggcgcctgcgcaactacagcacctatagccacagcgataacaacagccgctgggagtcggtttactcctatcttgcccgcgatattcacaccctacgcagccagctggtggtcggtaatacgtatacctcttccggcattttcgacagtttgagttttaccggtctgcagctcagttcggacaaagagatgctgccggatagcctgcatggctttgcgccgacgattcgagggatcgcgcgcaccaccgcggaggtctcggtttatcagaatggttacagcatttataaaaccaccgtcgctcccggcgcctttgaaattaacgatctgtacgccaccggcagcgccggcgacctgtacgtcaacattaaagagtctgacggcagcgagcaaaactttgtggtgcctttcgcgtcgctggcgatcctgcaacgtgagggccagctggactatgcgctgagcagcggcaggacgcgatcgggtagctccgacgataaagaatataactttattcagtcttccctggcctatggcgccaccagcaacatcactttttatactggtttccagcaggcggaagataaatacaccaacctgttgttaggcgctggctttaacctcggtactatcggtgcgctgtcgtttgatggctctcagtcgtgggccgacgtgaaaaccagcgatacggccttgtcaaccagtacagagcaagggcaatcgtatcgcgtccgcttcagtaaaagctttctgcagacgggcaccagcttttccgtggccggttatcgctactccacctcgggatattattcgtttcaggactttgtcgataactcttccacacagcgcgactgctgtacgcagagcggcagaacgaaaggccggtttgacgcatcgttgtcgcagacgctgtttggctatggttcgctctcgctttcgttggtcaatgagacctactgggacagttcgcgtatggaatcggtgggcgtgggctatagcgggtcgattggcaaggcctcctactttattaactattcctataaccgcaatgtgcaaagcaccgatgacagcagcaataaccggccggccagcgatacggtcgtctccctgacgttaagtattccgcttggcgagacgctctcggcaaattacaccatgaaccatggtcggcataacgataccacgcacagcgtggggctcaacggctcggcgtttgaggatcgttccctgaactggagcgtactggaagggtacaacacgcaggataaaagcacctccggcaacctcagcgtcaactaccagggctcgaaaggggatgtggctggcggctatggctacgaccgctacagcaatcactacaactattcgctgcgcgggggcatggtcgcccatacgggcggactcacgctatcacgctttcttggcgagagttctgcgctggtcgaaacgcctggcgtcagcgatgtgacagtgcgcggtcagacaaacgtgacgacggatgccgccggatatgcggtggtgccttacgtccgtccgtaccatcgtaacagcctggcgctggatgaacaggaaatacctggcgctgaagtggataacgtcgccagaacggtggttccgacgcgcaatgcgatcgtcaaagtgaagtacgacacgcgaattggctataaggcgatgctcaccctgcgtacccgcaatggcgtggtgcctttcggcgcgctggtgaccctcgataatgatcacggtagcgcgtcgcgcagcaatatcgttggcgatgaggggcaggtgtatctaacggggctgcagaaaaaaggccagctgttagcgcgctggggggagaaaagcagtgagcagtgcaccgttcattatgacttctccggcatggcccttggcgacgatattctgttctatcaggccgaatgtcggtaatggatgcaggttttcaacatggaagaggggctgatatgaatatgcgagacggcagcacaaggggcctcctggtggccattttgctgctctcccttccggcgctggcttatgagggcagcagcacggtcaattttaacgtcacgggcaccatcgaagcgccttcctgtgaggtggccgtggagccgtcgaacagtatcgatttaggcaccgtctcctcgcagacgttctccggacatgccggggcgagcggcgccagcgtgccggttaagctggtcttttccagctgttccgccgatgcgtcggcggtgaccatcgcgtttagcggcaccagcttcgatagcacccacgcttcaatctataaaaacttccagactggcagcaacggtgccagcggcgtcggtttgcagctgcagagcatggccgaccagcagccccttggccccggcgaccagtatctctatacctttggggacgatgcggatatccatacctttaatatggtggcacgtatgttttcgccttatggccaggtaaggtccgggatggtcgggtttaccgccacgttcgatgtggcttacaaataacgtttcgacagggatgggtatgaaaaaactgatcttattgctcatattggcactgtgtcccgtctatagctgggcggcctgcacgggaaccaactatggcgatgtctcgatgaccaacctgccggaaaagatcctggtcaatgccgggagctataccgcagggacggtactgtatgactcggggaagattacgcgctcgcaaacggaattgcttaactgtgaggggagcacctacgcggtttttgcctggtcctcgaacaatgccggggcactgataggggataatatctatgccacctcggtgcaggggatcggtatccgcgtcaaggtgtggctcaatatcagcggtgaatatggcgatgacaccgatgatttcagccccgactcgcaggtgcattatattggtgatgtgaattattacctcggaaagccgacaggtcttttcgactctttcgcgtcgactcattataccccggcgtatcagctgcagctggtggccaccggcggcgccatcgccagcaagagtcaattatcgttcagcgacccggtggccacggtatcggccaaggataaaaaggggaccatcgctatttcacaactgcacatcagcggcacaaccagcatccagctaatcccgatggggtgtattgtcggtagcaataatctcagtttttccatgggcagcatcaatgccagtgagtttaataccgcgacgaaggtgggtagcgcgcggcagtctctgagcctctcctgcgagccgggaactaacgtttcgatgcgtgtggcggctgcttctgcaagcggggataaccctgacaatacggtgatggccctcacggcggaacagaatgccgccactggcgtgggagtgcagttaaatttgaatggcaaagcactgccgttaaataccgatatcagcctctatacttcgagccgcacgacggtgaccaacagcggcgcggacgccagctacagctatttcaccaatcccgacagccccggaggcgcagcggccatgcagacgctcgctttatccactaactattacaggacggggagcgcggtgaccgcggggacagccaacgccaccggggtgatcacctttacttataactgaggggagaatcccttccccgaacgatgccggggaagggagaggacgattaatgcgcctggccgcgttcgataccgatcccggtttgtgaacggataaactgggcgcggaactgctcgcgctcgcgcatcccttccggtgagttatcggtggcggagaagacccagatgccaatgaacgcgatggcaatggagaacagcgccggatattcatacgggaacagcgctttctcatggccgaggatctgcacccaaatggtggggccgaggatcatcagaatgaccgcagtcagcaggcccagccagccgccgaccatcgcgccgcgggtggtcagcttcgaccagtacatcgacagcagaataatcgggaagttacagctggcggcgatggagaaggccaggccgaccatgaaagcaatattctgattttcaaacagaatacccagcagaatggccaccaccccaaggatcagcacggtgatcttggagaccttcagctcctgacgctcggtcgcgcccttgcggaagacgttggcgtacaggtcgtgcgacaccgctgacgcgccggcgagggtcaggcccgccaccaccgccaggatagtggcgaaggctaccgcagagataaacccgaggaacaggttgccgccaaccgcatccgccaggtgcaccgccgccatgttattgccgccgataagctgtccggccgcgtctttaaacgccgggttcgcgccgaccagcatgatggcgccgaagccgatgataaaggtcaggatatagaaatagcccataaaaccggtggcgtagaagacgcttttacgcgcttctttggcgtcgctcacggtaaagaagcgcatcagaatatgcggcaggccagcggtaccgaacatcagacccagacccagagagagcgccgatatcggatctttcaccagtccgccgggactcataatcgccgcccctttcgggtggacggccatcgcctcggtaaacaggttattgaagctgaagccgacgtgcttcatgaccataaaggccataaagctggcgccgcacagcaacagaaccgctttaataatctgcacccaggtagtcgccagcatgccgccgaacaggacatagagcaccatcagcacgccaaccagcactacggcgacatggtaattaaggccgaacagcagctggatcagcttgccggcgcccaccatctgggcaatcagatacagggccaccaccaccagcgaaccgcaggcggagagggtgcggatcggcccctgcttcaggcggtaagaggcgacgtcggcaaaagtgtagcggccaagattgcgcagacgttcagcaattagaaacaggataatcggccagccgacgagaaagcccagcgagtagatcagcccatcgtagccggaggtatacaccagcgcggagataccgaggaacgacgccgctgacataaagtcgccggcaatcgccagcccgttctggaagccggtaatattgccgccggcggtgtagtaatcgctgcgcgaacgcacccgttttgaggcccagtaggtgatgtacagcgtcagggcgacgaaaatcaggaacatgacaatcgcctgccagttggtcggctggcgctgtaccgcgccggtaatagcgtctgcggcgtgggcgccgaggggcagcagcgtggcggcgagcgccgtcaggactctcttgatcatgcttttacctcgttgagaacgcttttggtcaaacggtcgaattcaccgttagctcgccagacataaataccggtcaggataaacgaaatgacgatcacgccaatgccgagcgggatcccgcgggtgacgctggttccggcgtgcagcggggtgccgagccagccgggtgcaaaggcgataagcaaaataaagcccacgtagatcactaacataatcactgacagaatggcggcaaaccgttgccgtgatgcaactaactccctgaaatgcgcactattttctatccgctgacaaagttgttcattcatcttagcgtctccagaggtctccctttcgtcatccactcggcggacgctggcgacagcaacccctccggcgacggagccgggacaggtgttgctgacggcgttcctgcgagtgaaatcctgggggagggacttatttttatcctctccccggaaggggagagggtgtagggaatcggtctttacttacgatggcatggtaatggcctgcttctcttcgagcagtttttccacgacgccaggatcggcgagggtcgaggtatcgccgaggttgctggtgtcgcctgcggcaatcttacgcagaatgcggcgcatgattttgcccgagcgggttttcggcagcgaatcggtccagtgcagcacatccggcgtcgccagcggaccgatctctttgcgtacccagttacgcacttcggcatacaactccggcgtcggttcttcgccgtgattgagcgtcacgtaggcatagatggcctggcctttgatgttatgcgggatccccaccaccgccgcttcggcgatttttgggtgcgacaccagcgccgattcgatctcggcggtccccagacggtgtccggagacgttcaggacgtcatccacccggccggtgatccagtaatagccatcttcatcacgacgcgcgccgtcgccgctaaagtacatatttttgaaggtggagaagtaggtttgctcaaagcgctcatggtcgccgaacagggtacgcgcctggccgggccaggagtcggcgatggcgaggttgccctcggtggcgccatccagcggcaggccttcgttatccaccagcaccggctggacgccgaagaacggacgcgtcgcggagccggccttcagctcaatcgcgcccggcagcggagtgatcataaagccgccggtttcggtctgccaccaggtgtccatcaccgggcacttctcgttaccgatcttcttccagtaccactcccaggcttccgggttaatcggttcgccgaccgagccaagaatgcgcagcgaggagcggtctgtgccttcgatagctttgtcgccttccgccatcagggcgcgaatagccgtcggggcggtatagagaatgctgaccttatgcttatcgacgacctggcacatgcgcgccggcgtaggccagttcggcaccccttcgaacatcagggtggtggcgccgcaggccagtgggccgtacagcagatagctatggccggtgacccagcccacgtcggcggtgcaccaataaatatcgcccggatggtagtcgaaaacgtatttaaaggtggtggccgcatagaccagatagccgccggtggtgtgcagcacccctttcggtttaccggtggagccggaggtatagaggatgaacagcggatcttcggcgttcatttcgacgggccggtgttcggcgctggcgttcgcaatcaggtcgctccaccacagatcgcggccttcctgccagtcgatattgccgccggtgcgtttcaggaccaccacgtgctcaatgcttttcacgttcgggtttttcagcgcgtcatcgacgtttttcttcagcgggatggcgcgaccggcgcgcagcccttcgtcagccgtgatcaccaggcgtgagctggagtcgataatgcgtccggccaccgcctccggcgagaagccgccgaaaatgaccgagtggattgccccgatgcgggcgcaggccagcatcgccaccgcggcttccggcaccatcggcatatagatagcgaccacgtcgccttttttaatcccgaggtcgagcagcacattggcgaaacggcacacgtcggcatgcagttcacggtaggtgatgtgcttgctttggctggcgtcgtcgccttcccagatgatggcggtttgatcgccgcgttcggcgaggtggcggtcgagacagttagcggcgaggttcagggtaccatcttcataccatttgatggaaatattacccggtgcgaaggaggtgttctttacacgggtatagggccgcatccagtcaaggatcttgccctgctcgccccaaaatgtatcagggtcggttatggattgttggtactgcgccttgtactgatccgggttaatcaggcaacgttccgcaatattagcgggaatagggtgtttgtgaatttggctcatggctttttttctcctttgaacttgttaaatatatgtcaaacaaacgttaagagtaggggttttgacagctttgtttgttaattggggggcagatcacgcaatgattaaactgggtgaaatttcatcaaatgaaactttgaagcgaaataattacgcaaatgaatttatagaaacggaagctgtgaaattttttttattacaaatacttatgcaatataactgggggaaattcgctgctttatgcataaaagcagaggaaagccctgttcttaaaggcttgcgcagcatgccgtgcaaatgatactgatattgcgcgttaaataaccccacaaagcaacgcaacacaattcataccccctgcagtgggtaccatgacgaaaaggaatggtgcctttcattgaggaagtcagtagtgaagaaaacaaaaaaagtcagtctggcctggcaaattttgctagccctggtgctgggtatccttctgggcagttatctgcattaccacgctgaaagtcgcgattggttaattagcaatttgctgacgccggcgggcgatatctttatccatctgattaaaatgatcgtggtcccgattgtcatttcgaccctggtggtcgggattgccggcgtgggtgacgccaaacagttagggcggatcggtgccaaaaccattatctatttcgaagtgatcaccacggtggcgattgtgctgggtatcaccctggccaacgtcttccagccggggacgggcattgatatgtcgcagctggcggcagttgatatttcgaaatatcagaacaccaccgccgaagtgcagagccatgcgcacggcctgatgggcaccatcctgtcgctggtgccgaccaatatcgtggcatcgatggcgaaaggcgatatgctgccgattatcttcttctcggtgctgtttggcctggggctctcctcgctgccggcgacccaccgtgagccgctggtgacggtcttccgctctatctccgagaccatgtttaaagtcacccatatggtgatgcgctatgcgccggtcggggtattcgccctgatttcggtaaccgtcgccaccttcggtttcgcctcgctgtggccgctggccaagctagtgttgctggtttactttgcgatcctgttcttcgcgctggtggtgctggggattgtcgcgcgcctgtgtggtctgagcatctggatcctgatccgcatcctgaaagatgagctgattctggcttattctaccgccagttcggagagcgtactgccgcgcattattgagaagatggaagcctacggcgcgccggcgtcgatcaccagctttgtggtgccgaccggttactccttcaacctcgatggttcaacgctgtatcagagcatcgcggcgatctttatcgcccagctgtacggtattgacctctctatctggcaggagattaccctggtgctgaccctgatggtgacctcgaaagggatcgccggcgtgccgggcgtctccttcgtggtgctgctggccaccctgggtagcgtcgggatcccgctggaagggcttgcctttattgccggcgtcgaccgtatcctcgatatggcgcgtaccgcgctgaacgtggtgggtaatgcgctggcggtgctggttatcgccaagtgggagcataagttcgatcgcaaaaaagcgctggcctatgaacgcgaagtgctgggcaagtttgataaaaccgcccaataaaacacaaagcccggcgcgatagcgccgggctttttcttatcctttactaatccggtcaaactcttcgcagccggtatcaaacccctccaggcaactgacgttgagccagtgcagcgccttctgcttattcggttcgataaagcctttctctccctgctggaacatcatcccggcccagtattcggcatagccggtgcgggaaagtgatgaactgcctttaaagtattcacttgctttcacatcatcctccgggccgtgtacgccgctggcgtagatcagccccagcagcatctgggcatctaccgccgcatcgctttcgctatcccgggcagcatcctgcagcagcgtgatggcgtgcgctacgtcggtggcgccagcctgacggttgaccagcacccgcgcgaggacgatctctccggatttactgccggcctcgacggctttttccgccagctggcgggcctgcggatagtccgcctgttgggggttacggattttgagctgcgccagcagcgccaacgcatcgccatcgccctgggcggccgccttctgcgcccagtattcggctttttgataatcgccggagctgacccaggtatcggcaaggtaatattgcgcgcgtcgatcgccggcttcggcctgctgttgatactgactgccaggttcggtggcgaccgctgcgccgctggtgaaaaccagtagaaataaaaagaggtatttcatttgtatttattatcagtaaggaacatagcgcgcagtataaagggaggcgaaaaagaagaaaatggcgggtatcggtaggtaaggccgatttgcgctacctgaccgtaggcccgcgcaagcgcagcgccgccgggcgacagactgcggacacggagccgcttgtgtgccgggtggcggctgcgcctgacccggcctacgcatcgcgcgagccgggtcagaccgccgaaccttaacccatcgcgctttcgcgcaggcgggatttcagcttgttgtactcgtcgatcacgtactgttccgcggcgcgctgatcggcaatccgctcaacgttgaccgcgcagtacttgtactccggcgttttggttatcggactcaggttctctgagaccagctcgttacaggcgccgatccaccactggtaggtcatgtacaccgcgcctttattcggccgatcgctgacctgcgcgcgggtgatgatgcgccccttacgcgaattgacccataccagctcttcatcttcgatgcctagccgttcggcgtcggcggtgttgatttgcgcatagcctggttcatccgccagcgccgccagcgccgcgcagttaccggtcattgaacggcacgagtagtggccgacctcgcgcaccgtcgacaataccatcgggtactcgtcggtaagcttatcgatcggcgcgacccagtcgcaggtgaagaactgcgccagtccgttcggggtatcgaacttctctttaaacagatacgacgttccctgatcggcgtcggactcatcgcggcacggccacatgacatagccgagctcacccattttctcgtaggtggcgccgtagaagtccgggcacagatgccgcaactcgtcccagatctcctgggtgttattgtaatgcatcggatagcccatccgggtggcgatttcgctgatgatctgccagtcggttttcaggtcccacttcggctccaccgctttaaagaagcgctggaagccgcggtccgctgcggtatacacgccttcgtgctcgccccacgaggtggacggcaggatgacgtcggccgcggaggcggttttggtcatgaaaatgtcctggacgataaccagttccagatcgtcgaacgctttgcggaccgccgagagttcggcgtcggtctgcagcggatcctcacccataatgtacgccgcccgcacttcaccgtgcgccgcgcggtgcggcaattcgctgatgcgatagccggtatgcgcaggcaggctttccacgccccaggctttggcgaatttctcgcggttctccgggaacttgacgtactgatagcccggataggtatccggtagcgcacccatatcgcaggcgccctgaacgttgttctggccgcgtaccgggttgacgccgacgctcggcttgccgaggttgccggtgaggatcgcgaggctggtcagcgaccgcaccgtctccacgccctggtagaactgggtgacgcccatgccccacaggatggcggcggatttggcgctggcatacatccgggcgcaggcgcggatctcctgggcgctgaccccggtgatctcctccaccgactccggcgtatagccttcaacgattttgcgatactcctcgaagccttcggaacggctggcgacgaaggatttatcgtacagatcctcttcaataatcacgtggccaatggcgttgagcagcgcgatgttcgagccgttcttcagcgcaatgtgcatatcggcgatgcgcgcggtttcaattttgcgcgggtcgcagacgataattttcgccccgttgcgtttagcgttaatgacgtgattcgccacgatagggtgggaatccgccgggttgtaaccgaagataaacaccagatcggtgttatcaatctccgtgatggcattactcatggcgccgttaccgaccgactggtgcagacctgcaaccgaagggccgtgtcagacgcgagcgcagcagtcgacgttattggtaccaataacggcgcgcgcgaatttttgcatcacatagttggtttcattaccggtgccgcgggaggagccggtggtttggatcgcatccgggccatatttggctttaatggcgctgaggcgggtggcgacgtaatccagcgcctcgtcccaggagacggcttccagcttgccgccgcgttgacggcggatcatgggggttttcaggcgcggcgttaggatctgggtatcgttaatgaagtcccagccataatagcccttcaggcacagggttccctggttggttttcccctgcgccgcttcagcccgaacgattttgccgttatcgaccaccaggttgattttgcaacctgatgcgcaatacgggcaaaccgtgacgacttttttcatcggtcttgctccagttattcaatgggcgcgtttgcgctatcgcgccgtcactatgcatcttctatgccatattttcattgtgggtattccttgatgatacgcgggttttttgggcggaatgctgacgaaaaacagcctgtcgacagatttgacgtgtcgataccctggagatgtgacggcgcttgaaaaaatgtcaccgggagaggaatttgtcggcgcaggcttgcagaatcgatcagactgacactaattcccggcgggcagaggcaaaaatgaaaccagtcattttagtggtggatgatgacagggcgatgggcgagctgctcagcgatgtgctcggcgcgcacgcgtttgaagtgcttgtcagccagaccggcaacgacgcgctgacgacggtggcgcagcgggcggatatcgcgctggtcttactggatatgatcctgccggatacccatggcctgcaggtgctccagcagctgcagcgcacgcggcctgagctgccggtggtgatgctctccggtctgggcagtgagtctgatgtggtggtgggcctggagatgggcgccgatgattacatcgccaaaccgttcagctcgcgggtggtggtcgcccgggtgaaagcggtactgcgacgcagcggggcgctggccggcgaggcgtcgggcgccggtgctggcctgacgtttaacggctggcggctggataccacgcgctgtgaactgtataacccgcagcagcaggcgatcccgctgacccagggagaatatggcctgctgctggcgctggcgcagaacgcgcgccgggtattgaatcgcgaacagctgctggcgctgacccataacgaaagcaccgaggtattcgaccggaccatcgatgtgctgatcatgcgcctgcggcgcaaaattgagctcaacccgcatcagccgacgttgattaaaaccctgcgcggtctgggctatgtcttttccgccgacgtgacccacagcgagaaggcggcgtagggcgggtttgctgccaacccgctgttgactttatttggcgcagggagtttactttttttattaaagtgacactctgggttaatctatggcaacaaaattaaactggctgctgcaaaacagcgctcccggagatgtgatccttcagtcctggttaagccagcatgccatctctccctctctggcctttaaatacgcgcaaagtggctggttaaaaaaaagaggcaacggcgtatatgcgcgtgcgggacgtgagccggagtggaacgatgcattagcatgtttgcaaaatcagcttgccgctccggtgtatgttgcggggctcagtagcttagtctggcagggccgttcacactatctacagctaaaacaaaaccagtgctggcttagtgtggaaaataaagcgctgctgccgaaatggttcagggaattcccgggtgtggagtggatagtcatatcggggaaaaaactgccggtgctggatgatagataccgtgtaacgcttgatataaaagggaaaaaactcatcggcagtgcgccagaactggctgcttacgagttgctgagcgcggtgccggggaccctctcatttaaccacgctgcagagcttttccaggggctggttaatcttaatcctcgtaaagtagagtatcttctttccgtcagccagtccgtgcaggccaagcgtttgtatctcttcttcgccagtttttacgagcatggctggctcaaacgaatcgatagccaaaaaatcgatctgggagcgggcaagcggcaaatcgtggaaaatggaaagttcaatgctcaataccaaatcacagtgcctgaacgctttcaaaaggaataaaaaatatggatatacaggcgccttattatcggcaggttgctctgctaatgcaggttttaccctatgttgctgtcgaacgggaatttgcgctgaaaggtggcactgccatcaatctctttatccgcgatttccctcgattatcggtggatatcgacctcgcctgggtgcccctggaaagcagagccatcgctttacctcatatacgggatgcgcttgcacgtattgccgccaatctgcaacaacaggcaggtatgagcgctgtattacaagctaatcgttcagatgagatgcgtgtcattgttactaccgatagcgcgcaaataaagatagaggtttcaccggtcgcccggggaacattatatccaccacaggagcgagaagtggtgggggcggtagaggacgtttttggctatgccagccttccagtggtttcgttgcctgacctctacggtggaaaattatgcgcggcgctggatcgccagcatcccagagatttttatgacgtgaaattacttcttgatgcgcaggagcttgaccgtcccattttcaatgggtttatcgcgtatttactgagccataatcggcctctggttgaagtgctgagtcctcgctggaaagatattgctgaacctttttaccgtgaattcagcgggatgacatttgagacgatagccctggaggaactgacagcagtccccaacaggatgattgctgcgttaaaatcctgtttcacacaacaggatgtcgattttttactgtcatttaaacgaggcgaaccagactggcgtttagcgccggaaatgcgtattcaggatttgcctgccgtgcagtggaaattgcgcaatattcatcagatgccagcgataaaacgcgctgagtcattagataaactggaaaaggtgctggccgagtggcgcagttagttacctggcccgcccttgttgaactcagcgtaaaacaggcgtgatttgaataaaccgtatcccttttctcgccatgacacgccgttctcctgtggcatcgccctgatagcgggatctactcgatctaaacattctgcaactgaataaacgcctgcagctcagggagcgttttggcgccgtcgatcgcgttggcggcctgcaggccggcgcagaaggcgtcccccgcgccgacgctgccgataatctcctccggcggcagccgccatgacggtacccagcgcccggcttcggtacgggagacgccccatgccccctccggacaatggatcactacccgctggcgtacgccggcgtcaagcaatgcgctggcggcgcgggcgatattggcgacgtgcggctcgccgttgggtagacgaatctccagcccgctaaactcgctggcttccagttcattgatggtcaggtagtcaagatgcttcagcgccggcaggaccagcggccggtagcgcgggtcgcccttgcgcgacaccagatcgagggacacctcatagcctcgctcgcgcatctgcgccagcagtcgcgcgctgcgggtgccgtacacttcatcggggcgatcgaggctttcgagcagcagcagatagccgagatggaaaattttcagcggcgcatccagcggctcaaaagccgggagatcaagcaggcggttggcgccgggagagtgaaagaaagtgcgctggccttcggcgtcggtcatcacctgggtcatcgaggtgggggaggagctggtgcgctgtacgagctggcgattgatatggtactgatcgagcatggcggtgatgtagtcgccatcgttatcctcgccaatcaggccgaccgcctgcagcggcagcccggcgtgcattttggccagggtcagcaggacattcagcggcgcgccgccggtggcgcgttcgctatggacaatttccaccagccagccgcgctccggccactgcccgatctggtggacatgatcgaccagcatgttgcctgcggcaataatgcctttccgttccatgatcgctactccgcgccgtcatattcgttaagcgtagcgcacaatcggcggaacgattgtgcgccgggttgcgcttatttcacggtccagcctttgtaagagctgacgttatttttgtcgatcatcgtcaccgggatcagtaccggcgcggtcggcgcaggtttgccctgcaggatgtcgtagccaatctccactgccttcgctgccatcacctgtgggtcctgcgctggggtggcgacgaacagcgagttcttacgcttcagcgcctcttcgccgtccgggctgccgtcgacgccgacgatgaagaactcgctgcgctgcgcctgtttcgctgccagatcggcaccaatcgccgtcggatcgttgatcgcgaacacgccgtcaatcttcggattggccgccagcagggaggtcatcacctccaggccgccttcccggctgcctttggcgttctggttggcggagaggattttaatgtccgggtgttttttgaactccgtttcgcagccttcgacgcggttttgtacggcggagaccggcggcccgttgatgatcaccacgttgcctttgttgttcaggcggtcgctaatgtatttacaggccagctcgcccgcctgggtgttatcggaggtgatggtggcgtcggccccttcggcggcgacgtcaaccgccaccaccacgatcccggcctctttggcccgcttcaccgccgggccaatgcctttcgaatctgcggcgttgaggatgatcatatcgactttggcggcgataaagttatcgatctgcgccacctgctggcccagatcgtagccgctggagaccagcgtcactttgacgttatcccccgccagcttgcgggcctccagctccgcccctttggtgatctgtacaaagaacgggttggcaaggtcgcccaccgtcacgccaatcgctttcagctctttggccgacgcaaaaggggaggcggccagcagcgcgccagcacacagcgcggtgactatcggttttaaacgcattcgcttttcctcgcaggtaagatgttgttgttatgcactttgatgatgtcgggtacggtatttgtcgatcagcaccgcaatgatgatcaccgcccctttgatcaccagttgccagaagtaggagacccccatcagggtcatgccgttattgagggtggcgataattagcgcccccaccagcgtaccggtgatggtgccgataccgccgacgaagctggtgccgccgagaatgaccgcggcgatggcgtccagctcgtagccgacgccgaggttgccgttggcgctgtacagccgcgaagcgctcatcaccccgccaaggccggagagcaggccgctcatgccatagacaaacagcagcaccagccagactttgatgccggtcagccgcgccgcctgcatgttgccgcccaccgcgtagatatgcaccccaagggtggtgcggcgcaggataaaccagcacaccgcgatcaccgccagggcgatgactaccagccacggcaccgggccgaggtagtcattgccgatccactcgaagctgatatcggagttgatcaccgtggtgccgtcggccagcagataggcggcgccgcgcagcgccgtgtaggtgccgagggtgacgataaacggcggtagcccggcgaaggcgaccagcgcgccgttgaacaggccgagcagcaggccgagcatcagcgccgccggaatcgacagcaacgcaaactccgggatcagcgacaccaccatcgcggccactgcggtggtgccaaggatggagccgacggaaaggtcaatgccgccggtgaggatgatgaaggtcattcccgccgccagcacaatgttgatcgaggcctggcgggtgatattcagcagattgctttccgtgaaaaagttgggggcgataaagccgaaaacggcgacgatcaggatgaggatcggcagaatgccgacggtctgcatcaggtcgcccatcaacatttttttcgccgaagcggatttcgcgaccggcgcggaggtctctttcggtatgctcatagttgccctgccttaaggtgagaatcggtcacgccggtggccagcgtcatgatactttcctggctaatatcaccggcctgtagctcgccggcgataacgccctcgcgcatcacatagacccggtcgctcatgcccaccacttcgggcagctcgctggagatcatcagaatggcgacgccctggcgcgccatgtcgttcatgatgcggtaaatttcgcttttcgcgccgacgtcgacgccgcgggtgggttcatcgaggattagaatgcgcgggccaatcgccacccagcgcgaaattaacagcttctgctggttgccgccggacagtccgccggcgcgcacctgggcgtgcggcacgcggatgttaagcaactggatggcgtcatcggagatggtttgcgccttccggcggttgagcatcccccaggtcgcgtcgcgctccagcgtcgccatggtgatgttttcctgggctgccagttcgagaaacaacccctgttctttgcggttttcggtcagaaagccgatcccgaggtcgatggcttcccgcggcgagtggatcaccaccggctcgccgtcgatctcaatcaccccggcggtggctttgcgcaccccgaagatcagctgcgccagttcggaacgcccggcgccgaccagcccggcgaggccgacgatttcgccggcatgcaccaccaggctgctgggcttaatcttgccgccatcggtcagatcctcgacccgcaggcgcggctggccgcagggaatgtcccgttctttattgaacagatcgctgagcgggcggccgaccatcatgcgcaccagctccggtgcgttgagcttgtcgcgcaccaggctgccgacatactgcccatcgcgcaggacgctgacccggtcggagagctcatacacttccgccatgcggtggctgatatagatgatcgccatcccctcatcgcgcaggcgcaggatgagctcgaacaggcgctgggtttcccgcgacgagagggcggcggtgggttcatccatcaccagaatgcggctttgacggtgcagggcgcgggcgatctccacctgctgctgttcggcgatggtcagggtcatcacccggtcgctggctttgaactgggcgccgagacggtcgatcaccgcctgcgcctggctgagcatggctttgcgctgcaccagaccaccgcgcgccagctcgctgccgaggaaaatgttttccgcgacggtcaggttcggcgccagctgcatctcctggtagatcaacgtgatcccggcggccagcgcgtccttggggccgcggatcgtttgcggttttccgtcgatcaggatctcgccgctggtggcgctataggcgccggcgaggatcttcatcagcgtgctttttccggcgccgttctcccccatcagggcatggatctcgccgggccagaccgtcaggtcgacgcccttcagcgcgtagaatttgccaaaagctttggcgatatggcgcatttccagtaccggggtggcggtcatcgcggcgctcctgtctgtaagaacaatagctgcagtccaccaccggaaaataaatgcagaatgtcagaatccattcatatttgtcatagtgataaatagttaaccgcgatcacagttacgcggcgtcattttctgcaccgtcacgcttatctgccgaccgatccttcaccggagttgttatgaccgctcgccgacacccgtttttcaccagcgcccgtggccgcctgctctcctttaatctgctgatgggcgtggtcaccctgttggtcagcggcgtggcggtgttcggctttcaccacgccagccagctgcaggagcaggtgcagcgccagactctcaacgacatgcgcggcagtatggatctggcgcgggacacggcgaatgtcgccacggcggcggtgcgcctgtcgcaggtggtgggggcgctggagtacaaaagcgaagcggaacggctgctggcgacgcagcaggcgctgaagcactcgctggcccagctggcggcggccccgctggcgcagcaggagcaggcgcgggtggccaatattattcgccgcagcaacgcgctgcagcagagcgtggcggagatgctggagcgtggccagcggcgccatctgcagcgcaatgcgctgctgagttcgctttaccagaatcagagtaacctgcgccatctcgccgatcttaacgatcgcggctgggataaggcgatcgatccgcgccggctggccgagatggaccggctgatcgtggctgcgatccataccgtcacgccgcggtcgatcgtcctgcaactcgaccagctgcgcggtgccctgccgacacgcagcgccgatcccgcgctggcgtttgtcctccctgatgtgacccgcgagctggcgacgctggccccgctgtcggcccagctggaggagagcgacctgacgatcagctggtacatgtatcacatcaaagcgctggtcgcgttgcttaacgaagatatcaatcagtacgtgacccgggtggcggaagcctcagagcagcgggcggcgcagagccatcgggagctgcgctccatcagtatgtttattctgctttccgcgctgctggcgctggcgatcaccggctgcgccgggtggtacatctaccgtaatctcggctcgaacctgaccgccatctcgcgggcgatgtcgcggctggctcagggagagccgaacgtctcggtgccggccctgcagcggcgcgacgagctgggggagctggcgcgggcctttaacgttttcgcccgcaatatggcgtcgctggagcacaccacccggctgctgaaagagaagaccaaccagatggagatcgatcggattaagcgccaggagctggaggaggcgctgctgcatagtcagaagatgaaggccgtcggccagctgaccggaggtctggcgcatgactttaacaacctgctggcggtgattatcggcagccttgagctggtggagccggatgcgcgcgatgcgccgcgcctctccagggcgctgaaggcggcggagcgtggggcgcttctgacccagcggctgctggccttttcgcgcaagcaggcgctgcatccccaggcggtggcgatggcgccgctactggagaacctcagcgagctgatgcgtcactccctgccggcgaccttaagcctggagattgaggcgcagtcgccggcgtggccggcatggatagacgttggccagctggaaaacgccctgatcaatctggtgatgaacgcccgcgacgccatggcggggcgcgacggggtcatcaaaatacgcacctggaatcagcgggtcacccgcagcagcggccagcggcaggatatggtggccctggaggtgatcgatcatggcagcgggatgtcgcaggcggtgaaagcccgggtgtttgaacctttcttcaccaccaaagccaccggcagcggcagcggcctggggctgtcgatggtgtatggctttgtgcgccagtctggcggccgggtggcgctggagagcgcgccggggcaggggacgacggtgcggctgcagctgccgcgagcgttgaccgaggttgagaaggaggtggcgccagcggtggacgagccgtccccggcgggcgagcggctggcgctggtgctggaagatgaagaggatgtccgccagacgctatgtgaacagctgcatcagctgggctggctgacgctggaaaccgccagcggtgaagaggcgctgcagctgctggaggcctcgccggatattgccctgctgattagcgatctgatgctgcccggggccctgagcggcgccgatgtgatccataccgcccgacgccgctttccggcgctgccggtgctactgatcagcggccaggatttgcgtccagcgcagaacccggccctgccggaggttgagtggctgcgtaagccgtttacccgagcccagctggcgcaggcgctgagcgcggcgtacgcgaggatttgagattcctccgctacccgggtttcatgcggatgattaaggtagcggcaggactctgatgagattggccccgatgaaacgttacgcaaccgcactgctcttttgcactctgtcgctgaccagcctggccgctcgcgccgatattatcgatgacgcgatcggcaatattcagcaagccattaacgacgcctataacccgggcagcagtcgctccgatgacgacgacagatacgatgacgatggccggtatgatgacgggcgctatcaggggagccgtcagcagagccgtgacagtcagcgccagtatgacgagcggcaacgccagctggacgagcgccgccgccagctggatgaacgccagcgtcagctcgaccgcgatcgtcgtcagttagaaagcgaccagcgtcgtctggatgatagctactgatcgccccccgcaggccagcgcttaatccagcgctatttccatcccgtcatagcccgcttcgaaacctgtcggcagcgggttatccatcatccagatgtcaaactggtggctgatatgggtgaggatcacccgcggacagccaatgatctggttaaggctgcggacggtgtttagatcgttatggttacgcggggtctgcgcgcgcggctcatgactgcagtcgatgatcatcgcctgcgggcggttattgagcaaaaacttcagcgacttgtccggcagcccggcggtatccgagagccaggccagccggctgtgggccgactccagcagataaccaaaggtcagcttcgagtgattaaggggtaggggcgtcacccgcagcccctgcaggttaaacatcacaaacggcgtgacggtatggctaaagtcaagcagaccggggtgtttgagcagatcgtcgcagccggcgtcatccggcgggccatagaccggaatcgacgcgccgactccccagcgcagcggaaacagcccatgcacatgatccagatggtagtgggtcagcagcacctgttgaaagctgccggcgggatgatgctccatcagatccggtcgtccggcatcaagcagcgtcacggcgctgttgaacgtgaccactccgctacaggggcggcgtcggtggctctcctcgcggcgggcgcggcggcaggccgcgcagtcgcagccgaagaccggcaccagctgagcgccgccggtgccggttaagcggagggtcaggctcatcgtgtcaccttttgtttataccagttgatccgcttcgcgcgccgcgtggctgcgcagcaggcggaaaaattcatcgaccgattgtcggagactgccgtcgttattcaatgtcaggcagttgtccggcttatagcgcgcggcgcgttccagacgctgggcgatttccagcgcgttttcccggccgcgctgctccagccgctggcgcagcaccggcggcgagacggcgagacagatcggcaccagcacctcgccgtaacgttcccgggccagcgccaggtgggcgcgggagccgttggccaccacgtcaaagccggcgtgcagccagaggtcgatctccacgccaatgccatagtaagtattgttggcgtgccagctgagagcaaaaagatgctgctcggcgcgggtaaaaaactcatgttcgctgagggcgatatgattctcgctgcccgcgttaaacgggcgggttatgtaacgatgggccaccagcagctgcgggtgctcgcgctggcgcagcgccgccagcaggctatctttaccggagccggaggggcccaccagccaaatcagttttcctggcattaaaagaccctctttccctggcgccagacatggtcgatctggatatgttcgccgcgacggtgcgccagcaccaggtcggcgcgtttcccctcggcgatgacgccgcgatcgtcaaggcccagcgtctgcgccggatgctgactgaccagacggatcgcctgtggcagggtgaaggcattgtcctcggcgtcggcgatgcggaaagcggcatccagcaggctggcggggtaatagtcagatgagaggatgtccagcaaaccgtggctcgccagctggtgggcggcgacgttgccggagtgggaaccgccgcgcacgatattcggcgcccccatcaggacgtgcatcccgtgctgacgtgaagcctgcgccgcggccagggtggtgggaaactcggcgatgacgctacccagctggtgggattcagccacatgcgcctcggtggcgtcgtcgtggctggcgagggcgatacggcgggcgcggcacatggcggcgatggtctggcgattgggctgcgaccaggtggcggccagagccatctgctcggcttcaaaacggtccatttcgtcatgcgtcagatgatattttccctgatagtaatcgcggtacttgctgcgatcggcgtactgacgctggccgggcgagtggtccatcagagagaccatgctcaccgactcgcggtcgatcagcttttcaaacagcggcagcgtggtgtgatgcggcagctcgcagcgcaggtgcagacggtgctctgcgcggttaagaccgcgcttttgcgtctcttccaccgcattgaccatcttctccagattctcaagacgatcaccgccatcgcgcacgtcgccaatcgccacggcgtccagcacggtggtgatgccgctggcgaccatcatggcgtcgtggctgctcatcgccgagtgggccggccagtctaccttcggccgcggggtaaagaacttgtcgaggttatcggtatgcagctcgataaggcccggcagcagccagccgccttccccatccagcgcctgcggcagccggctctggctttcggcgaaggcgaggatgcgaccgtcctggacttccagcgaaccgtggaccacctcgtcgtcgagaaccagttttacgttattgataatcatgctgtcattcccatagagtgcagtcggtcggcgacctgacggcgtaccccttcgtcatggaaaatccccacgatggccgcgccgcgcgctttggcatcgtggatcaggttgaccacggcagcactgtttttgtcatccagtgaggcggtgggttcatcaaggagcaggatcggatagtcgaccgcaaaaccgcgggcgatgttgacccgctgctgctcgccgccggaaaaggtggacggcgcaaggtgccacaggcgttccggaacgttgaggcgggtcaggagctgggcggctttcgcggcgctcgcttcgcgcggcgtcccaagatcgagcagcggctgcatcaccacctccagcgccgaaatgcgcgggatcacccgtagaaactggctgacccagccgatggtggttttgcgcacttccagcaccttgcgtggggtggcggtgaccaggtccacccattcgtcgccgtggcggatatggatatggccgctgtccggcagataattggcgtacagcgaacgcagcagggtcgatttgccgctgccggagtgaccgtggagcaccacgcactccccggcgttaacggtcagcgaggcgtcggccagcaccggcagacgcacgccgtgctgctggtgcagaacaaaggttttatggacgttttcaacgcggatcatgttagctctcacgaggttgggttgccgggtggcgcttcgcttacccggcctacgaataacgcacctgtgggccgggtaaggcgcagccgccacccggcaaaacagcattaattctgcaacaccgacgacaccagcagctgggtgtaaggatggtgcggatcgtcgagcacccggtcggttaagccactctccaccacctggccctgcttcatcaccagcagacggttcgccagcaggcgagcgacgccgagatcgtgggtaacaatcaccaccgccagattcagctccaccgccaggccgcgcagcaggtctagcagccgcgcctgcacggacacatccagcccgccggtgggttcatccataaacaccagcttcggctgggtgaccagattgcgggcgatctgcagacgctgctgcatgccgccggagaaggtggtgggcaggtcgtcgatgcgcgagggcgggatctccacctcctgcagccacttttcggcggtggcgcgaatgttgccgtagtggcgggcgccggtggccattagccgttcgccgatgttgcccccggcagagacctggcgacgcagaccgtccatcgggtgctgatgcactacgccccattcggtgcgcaacaggcgtcggcgttcggcttcgctcatggcgtacagcgagcgctgctggtacagcacctcgccctgctgcggcgtcaggcgggcggagattgccttcagcagggtggttttaccggagccggactcgccgacgatgccgagcacttctcccggccacagctcgaaggagacattgcgaaaacctttatccggggcgtagagatgagtcaggttattcacagcaagtaatggctggttcattttttctgcccctcgctctgctggcggcaatagtcggtatcggagcagacaaacatccgctggccgctgtcatccagtaccacttcgtcgaggtagctgtggcgcgagccgcagatggcgcagggctcatcccactcctgcacggtaaagggatggtcgtcgaaatcgagactctccaccggggtatagggcggcacggcgtagatccgcttttcgcgcccggcgccgaacagctgcagcgccggcatcatgtgcattttcgggttatcgaatttcgggatcggcgaagggtccatcacgtagcggccattgaccttcaccggataggcgtaggtggtggcgatatggccgaagcgggcgatatcttcatatagtttcacctgcatgacgccgtactcttccagggcgtgcatggtgcgggtttcggtttcacgcggctcgataaagcgcaatggctccgggatcggcacctggtagatcaggatctgatcctccaccagcggcgtctccgggatccggtggcgggtctggatcagggtggcgtcttcggtacgctcggtggtggcgacgccggtgacgcgcttaaagaactgacgaatcgacaccgcgttggtggtgtcatccgcgccctggtcaatcaccttcagcacgtcgttctcaccgatgacgctggcggtcagctggatgccgccggtgccccagccgtagggcattggcatttcgcgcccgccgaacggcacctggtagccgggaattgctaccgctttgagaatagcccggcggatcatgcgcttggtttgctcgtcgaggtaagcaaagttatagccagtcagtgggttagccacgttcgttctcccgttgcaggcgtttcagcagcgccagttcggcctggaaatcgacatagtgcggtagcttcagatgcgagacgaagccggccgcttcgacgttatcggcgtgagccagcacaaactcttcatcctgcgccgggccggcaatctcttcgtcatagtccggcgcctgcagcgcacggtcgaccagcgccatggccatcgctttgcgctcgctcatgccgaaggtcaggccgtagccgcgggtgaagtgcggcggctcctcctgcggggcgacgaagccattaaccatctcgcactcggtcagcagcagctcgccaatattgacgctaaagcccagctcttccgggacgatttccacctgcacgtagccgctgcggatctcgccggcaaacggatggttgcggccatagccgcgctgggtcgaataggccagcgccagcaggtagccttcatcgccgcgcatcagctgctgcaggcgcgaggaacgcgagcaggggtagaccggcggggtgcgggtgatatcgtcgggcggcgtgccgcgatcttcctcggtcttcgccagcccctgctgcgtgagcaggctaaagacgtgcggcgtcggctctgcttcgccatcggcttgctgcacagacggcgcttcgccattggccagcagggtaaaatcgagcaggcggtgggtgtagtcgtaagtggggcccagcagctggccgccggggatatctttatacactgcggagatgcggcgttcgaggcgcatctccgcggtattaatcggttcgctgaccgccagccgcggcagggtggtgcggtaggcgcgcagcagaaatattgcttcgacgttatcgccgctggcctgcttcagcgccagcgccgccagttcgcggtcggcgatgccgccctcggtcatcacccggtccaccgccaggctgagctggtcgcctatctgttcgacgctcagttcgggaagccgtccatcgccccgtcgtttctgttcctgtaaggcgtgagcggcgcggatcgccttctcgccgcccttgacggcaacgtacatttagcacacctccacgtgggtggtgcgcgggatcgccagcaggcgctcgccgcaggtgaggatcaggtcgatgcccagcgggaacggatgcgggcgttcggttaattcgtcgatgatgcagtccggcagctgcggcgcgatcattcgctcttcggcaatgcctgccccggtcaggcgcagcatgcgtccgccgctgaggctggcaagctgaacgatcagtgtgacgccggtttccggcgcggtgacggtgccagcggaaaggacgttgagctgctcggcgctgataccgtcattggcgacggcaaagaccgcctgctgcggctggtccaccagcggcgcgccggtatgaaagcgcagattctgtcccaccagatcgttacgcagagcgctggcgagccagaccggtgtttcatgatcggcaagggtcaacagcaggctggtggaggccacgttcaatggctgccagccgtgctgaagctgctgcagggagacaatcacccccggctcgctcatcgctttcagcaggcgacgaaaactgtgttgggcatcctgcacagccagggtaaaagcgggttgtaaggtcatacgttatctccgcgaaccagggtaaagaagtcgacccggctggcgttgacttcggcgcgtcgggcttcaatgcgcgcgctgcgtagcgcttccagcggggttatcagagtttccattaaggtgtgaaaatggcggggcgactgcagcagggcgtcgatcgccgcgcagcgttcagcgtgcgggcggtcgcggcctaagatccagctgtaaccgagggtaccgtcagccaggcgtaccgctgcgcgggtaagggtggcgtcgccggcaaagaagcggtcgccgataccgcccatgcgggcctggagctgtaccagcccggtttccggggtgcgaatcaattcatattccggcgccagctgcagggactgcatgcgcgccagaaggtcctgcggttcactgtgggccagcacggacatccagcgctggcgggtggcggtatcgaagtgcattcagtgctccatggtaaattcaatcatgtcggcgcgggtcaggctgacggagtactccgccgtgagcgactcgccctcgcggctattgagcgtgcggacgcagagcagcggcgccatattggggatttccagcagcttgctctcttttgcctgcgcgcggcgggcgctaattttggtgcgtacgcgggtcagttcgacgtcgagccgatcgcgtagcagatcgtgcagcgagccgtggctgaaggtctgtagcaccggccagaagcgcaggtcagcgaagtagtggtcgatcaggcacagggcgacgccattgacccggcgcagggtacgcaggtggatcacgttctcgccctcattgatgccaaaggcctcggcgacatgggcgctggcggggcgcagcaccgacagcagcttttcgctggtgggatcgctgccttgttccagcaggttttggctgaagcgcgcctgggcgttaagcgggtagtcgatggggcgcatcagcaccagcacacccacgccctgacggcgctgaacccagccgcgctcaaccagctggtcgatagcccggcgcagggtgtggcggttaacgtcgaagcgcgtcgccagctgctgctcggcgggcagatagtcgccgcagcgatagtggtggcgcagctcctgctcaagtcgggcggcgatttcctgatagcgcgtggggtaactggtcggatgtctggacaggtgcatggtcatcaagcctcacacagcataggcgaggagcttcctcgcgttgtgggccgatcctgaccggtttatgttgcatttcggttaagtgacgatgaccaaaggatgaagagttgatgccaggcggatgacagggcggccgggccgccctgggggcgtcagccttgtttgaccacgttgatcatccaggggacgccaaagcggtcgacgactttgccgaagccgtgggcccagaaggtttcctgccaggccatctcaatgcgcccgccgacagccagcgcgtcgaaccagcgctggccttcagcgacatcgctgggatcgaggacgagggtgaagccggcgtaatgcacatcgggcccgaaggcgctgtcgctcagcatcagctggccattattgatgcgcaggctggcgtgggcgatagcatcatccgccatcttctggccagacgggcagccgtctgacgcttcctgcgccgggggcggcatttcgccaaaggtcattttaaacatcagctctgcgcccagcgtctgctggtagaaggcgatcgcctcggcgcagttgcccgcaaaggcaaggtagggacttaaggacatggtgaatacctcagtgaccgtaacccgtaaagcgtagtcgcccggcaggcgattgagccagacggcagggcgaaaaggggcgctgaaatatgacggcaggcgacagcgtaaatagcggttgccggcgagggaaataacaggatgcgccgggggacaaacggccaccaggatatcgggagcggcgacggttatgtgaaaaaataatcgtgccgcctacccgaaattaaatcagttctttttcacaaattccgatttgagcttcatcggaccaaaaccgtcaattttgcagtcaatattgtgatcgccttcgaccagacggatatttttcactttggtgccgattttcagcatcgaagagctgcctttaaccttcagatctttcacgacggtaacgctgtcgccatcggccagtaaattgccattggcatctttaacgatcagaatgtcgctctcttccgtcgcctcggcagggttccactcatgggcacattccgggcagatgtacatgccgctatcttcataagtgtaagtcgaatcgcattttgggcagtgtggcagttgcatgacgctcctcatgatgtcgtcgaaaaacaggacgttggtcctttaaacagcggctgagagccgaaagtgggtatgattatagcgcaatcacccacttttgtcgggtgtttttttgctaaaaagtagccgtggtattattccgggaaaaagcgaataaacgctgaaattaaccgcccgaagtggagcaaaatcgaagaaataatttccgcgcgatcggcaggaaatgaacttatttattttccgacactctgtaatgaggcggtaaatttctgtgaagttgatcgcagatataaacactgttagggtaaaaaaggggagcaggtcaatttcatcaagcatcacgatgagccgctccatttattcaccagtagccagagcaggcgtcaacaggttcggttgtacattctgtcagcagacagtgcaggcaaacctgctacgcttgaaatgaggagcacagcaattcaccgctcctgacgcacgatgcgaatggccttgccattcggcgaagaggcgtgcactcaaggcggagtagcagaggaaaaatatgcttaaaaggaaaaaaataaagcccatcacccttaaggatgtgaccatcatcgatgatggtaaactgaaaaaggcgatcaccgcggcctccctgggcaacgcgatggagtggttcgatttcggcgtctacggctttgtggcctacgccttaggtaaagtcttcttccccgatgccaacccaagcgtgcagatgattgccgcgctgggtaccttctccgtaccatttttaattcgtccgttaggcggcctgttcttcgggatgctgggcgataaatatggtcggcaaaaaattctcgcgataactatcgtgatcatgtcgataagtactttctgtatcggccttattccgtcgtatgccacgataggtatctgggcaccgatcctgctgctgctgtgtaaaatggcgcaaggcttctcggttggcggtgaatataccggggcgtcgatcttcgtcgcggaatactctcctgaccgcaagcgcggctttatgggcagctggctggactttggctccatcgccgggtttgtgatgggggccggcgtggtggttctcatctccagcgtggtgggtgaacagaactttctcgactggggttggcgtatcccgttcttcctggcgctaccgttaggtatcattggtctctacctgcgccatgcgctggaagagacgccagcgttccagcagcatgttgacaccatggagcagggcgaccgtgaaggactgcaggacgggccgaaggtctcttttaaagagattgccaccaagcactggcgtagcctgctgacctgtatcggtctggtgatttccaccaacgtgacttactacatgctgctgacctacatgccgagctatctgtcgcataacctgcactactcggaagatcatggagtgctgatcatcatcgctatcatggtcgggatgctgtttgtacagccggttatcggtatgctcagcgaccgtttcggccgtcgcccgtttatcctgattggtagcgtggcgctgtttgccctgtcgatcccggccttcattatgatcaacagcaacgtgactagcctgatcttcgccggcctgctgctgctggcggtggtgctgaactgctttatcggggtgatggcctcctcgctgccggcgatgttcccgacgcacatccgcttcagcgccctggccagcgcctttaacatctcggtgctgattgccggtctgacgccaaccctggcggcgtggctggtggagaccacccaaaacctgatgatgccggcgtactacctgatggttatcgcggtggtgggtatggcgacgggcctgtcgatgaaagagacggctaaccgtccgctgaaaggggcgaccccggcggcgtcggatatccaggaagcgaaagaaatccttggcgagcactacgataacatcgagcaaaaaatcgaagatatcgatcaggagatcgccgatctgcaggcaaaacggtcgcgtctggtgcagcagcatccgcgtatcaacgactaaccgttttcactgttaatcatgccgccaggggaaaccccggcggcattttttatgccttcggcaaggccaggccgtgacgccgctgctggctgagtttacggtactgctgcggcggcatgcccacgtagcgggtaaaagtgctgtagaagcgactgctggagcgaaaaccggcggtaagggcaatatccaggatggtcttgtcggtatcgctcagcagcgcccgcacatgattgatacgcatggcggtaatgtactgcttcatggtctgctgcatcacccgctgaaagacccccatcgcgtagttcgggttgagcttcacgtgctcggcaacggcattgacggtcagcgcctggtcgtagtgggcagcgataaactccagcatctggctgacataaaactgcgcgtggcgcgagacgctgttcttgtgggtgcgtgaggttttattgaccagaatcggctgccagccggcgaggctcagccgcttcagcatcagggcgatttcatcgatcgccagctggcgtatctgttcattctcgtggctcagttcctgctgccagcggcgcacttcgaaggcgctcaactgctgcgcggcgagggatttaatcaccatcccatgggtgacgtggttgataagctcccggtccagcggccatgagagaaacagatgcatcggcaggttgaatatcgccatctgctggcaatcgccggggcgggtcagctgatgcggcgtacaggcccagaacagagtgatatagcctttctcaatgcgcaccacttcgttattaatcaaatactccacgtcgccatcgaacggcacgttgacctccacctggccgtgccagtggctggtgggcatggcgtgcggcgggcgcagttcgatatccatacgctgatactcggagtagagcgccagcgggctgcggctctgcttttcgtcgctgctgcacataaagggatcggggggcagagaggtgaagcggtgttccatcgttagcgtattcctgaattgtcagagtggctgcatttttcgccagaactgacgacagcttagcggaagaatcggcccattttctctcctttttgctcaatctgttcccgaaatctcagattttgtggcgcttaatggccgatctgagctttcgggaatgctccggcgggaacagggcagcgcagcggggagcggcgtgccactctgcaagtgttcaatgacctgatggagagtgcgtgatgtctgccccaaaaattacttttatcggcgccggttcgacggtgttcgtcaaaaatattctcggtgatgttttccagcgcccggcgctgaaatcggcgcatatcgcgctgatggatatcgatgaaacccgactggaagagtcgcatatcgtggtgcgcaagctgatggattccgtgggcgcgaacggcgaaatcagttgccaccgcgaccggaaaaccgccctgcagggcgccgattttgtcgtcgttgccttccagattggcggctatgagccctgtaccgtcaccgattttgcagtctgcaagcgccacggcctggagcagaccattgccgatacgctggggccgggaggcattatgcgcgcgctgcgcaccatcccgcacctgtgggctatctgcgacgacatgagcgaggtctgcccggacgccaccatgcttaactacgtcaacccgatggcgatgaacacctgggcgatgtacgcccgctacccgcatatcaagcaggtgggtctgtgccactcggtgcaaggcacagcggaagagctggcgcgcgacctcgatctcgatccggcggatttacgctaccgctgcgccgggattaaccatatggcgttctatctgtcgctggagaaaaagctcgcggacggcagctacgtcagtatctaccccgacctgctacaggcctacgccgacgggcgggcgccgaagccgaacctgcacggcaatccgcgctgcgaaaacatcgtccgctatgaaatgttcaaaaagctgggctactttgtcaccgaatcgtcggaacatttcgccgaatacacgccatggtttatcaagccgggccgcgatgaccttctcgctcgctataaagtgccgctggatgaataccctaaacgctgcgtcgagcaactggccaactggcatcaggagctggagagctataagcgcggggagcgcattgaggtgaaaccctcccgcgaatatgccagcaccatcatgaacgccatctggaccggcgagccaagcgtggtgtacggcaacgtgcgcaacgataatctcatcgacaacctgcctcagggctgctgtgtggaagtggcctgcctggtggacgccaacggcatccagccgaccaaagtgggcgcactgccggcgcatctggcggcgctcatgcagaccaatatcaacgtgcagacgctgctcacgcaggcgatcctcaccgaaaatcgcgattacgtctattacgccacgatgatggatccgcacaccgccgcggtgttggggatcgaagagatctacgcgctggtggacgatctgatcgccagccacggcgactggctgccggcctggctgcaccgttaatcctcttatgccgccgggggcaacgaacccggcggtgcctgtcacgctctatcaaacgctgaaggaggcgctggcgacagcgacctggaccctatgagtatttcaatgacaacaaagctcagctacggatttggtgcctttggtaaagatttcgctatcggtatcgtctacatgtacctgatgtattactacaccgatattgttggcttatcggtcggggtggtcggcaccttgttcctggtggcaaggatcctcgatgcgatagccgatccgattatgggatggatcgttaactgtacgcgatcgcgatgggggaagttcaaaccgtggatcctgatcggcacgataaccaactcggtggtgctgtatatgctgttcagcgcccaccacttcagcggcggggcgctgctggcgtgggtgtggctaacctacctgctgtggggcttcacctacaccatcatggatgtgccgttctggtcgttggtgccgaccattaccctcgataaacgcgaacgcgagcagctggtgccttacccgcgctttttcgccagtctggcgggatttgtcacggccggcgtcacgctgccgttcgtcaacgccgtcggcggcgccgatcgcggtttcggttttcagatgttcactctggtgctgatcgccttcttcgtcgtttccaccctcgtcaccctgcgcaacgtgcatgaggtttactcctccgacagtggtgtgagcgaagactccagccacctctcactgcgccagatggtggcgctgatctataaaaacgatcagctggcctgcctgttaggcatggcgctggcctataacacggcggcgaacattatcgctggctttgcgatttactactttacctacgtgattggcagcgcggagatgttcccgtattacatgtcctacgccggggcggcgaatttgctgacgctgatcctgttcccacgactggtaaaagggctgtcgcggcgcattctgtgggcgggtgcttcgatcatgcccgtgctgggctgcggcgtgctgttgctgatggcgctgggcggcgtttacaacatcgcgctgatttcgctggccggggtgctgttgaatatcggcaccgcgctgttctgggtgctgcaggttattatggtggccgataccgtcgactatggcgaatatacgatgaatatccgctgcgaaagcatcgcctattccgttcaaacgctggtagtcaaagccggttcggcgtttgcggcctggtttatcgccatcgtgctgggtatcatcggttacgtgccgaatgttgtgcagtcgtcccacacgctgctggggatgcaggcgattatgattgcgctgccgacgctcttttttgctctgacgctgtttctctatttccgttattacaaactgaatggcgatatgctgcgacggattcagattcacctgctggataaatatcgccgggtaccggaaaatgacgtcgagccggaacggccgattgtggtacccaatcaggtgtaaaaagcgtgcgaaaaccgctgacgaaagaggggagggatgctctctttttgagcaaaaaacagtgtcttaaaaagacagaaagagaaaactgtagttctctattttatctcaattatttctctttttgagcgttctggactgtttgtttctccgattgttctcaaataaaactcagaattgtctctttttcgtgctcttgcgctgctttttaactcttgctactctttttgggtcttacatttttctcttatttgtctcagtgatggagcaatgcaatgcgcatttttatcgatgatggttcaaccaatatcaaaatgctgtgggagcaagatggcgaaactttcacccatatcagccccaacagttttaaacgcggctggtctgccaccttcggttcggggaagccttttaactacacggtggatgatgaaaagtactcattcgacctgatcactcccgatgcgctcccaaccaataacattgactggcaatatagcccgttgaactccatcgctgtccatcatgcgctgctgaccagcggtcttgagccacaggatgttgaaattgtggtcaccctgccgctgaccgaattttatgatgaagatgcgcaatatcgcctcgacaatattgagcgcaagaaaaagagcctgctgcgcgaagttaaactgaataaaggcgtggtgttcaatatcactaaagttaccgtgcgcccggaatcgattccggcgggcattagcctgtgtgatgagctgaaaccgtcgcattcggtgctgattatcgaccttggcggcaccacgctggatatttcaatggtcgccgggcagatgacctcggtttcgcgcatttacggcgacccgaagctgggcgtatcgctggtgaccgacgccgttaagctggcgctggcccgggcgaataccgacacctccagctataacgtcgaccagataatcatcaaccgccacgacgaagaatacctgaccgacaacatcaacgatccggatgcggtttctgaggtgaagaaggtgatcaataacagtatcgaacgtctgaccacgcgtgtcctgacggccatcgatagctttaaaggctattcgcacgcgatcgtcattggcggcggcgcgccgctggttgccgacgccattcgtgaacggatgggtctgcgcgaggatcgtttcgtggtggctgaagagccgcagtttgccctggtgcgtggtctgaaaattattggttaaggagcgtctatgactctggatcgcagaaaagtgctgatttacctgcgcccggatatcagcgccagcgagcgcttcgcggacgcaaaaattgaggcccatcaccgtggcgaccgcggcgatatgtcgcgtaccgcgctgctggcggggctggcgttaggggaagtcgatagccgcttgccgtcgatgctggcggcgctgctggcggaagatactaaaccggaaacgctgcgtaagatgctggcctcgttccttgagatccagccggcctctcccgccccggcagccgcggcagcagccgccccggctaaggcgccggagccgcccgcgccggtgagcgagagcgtctccgcgcgtaatctcgccggttcgttaccggattaagcgctattcccggtttgcgcgacccgggaaactccccggcttgcgctgcgcttagtttgtaggccgggtaaggcgtagccgccacccggcatacaggcggccccctggctggggccatgcccggcggcgctacgcttgcgcgggcctacggatccagtgcaatggtgggcccagtgccatttgtaggccgggtaaggcgtagccgccacccggcgcgaagacggaacgccacgacccgggatggcacccctatccgtgggcgaggaagcgcgccaggcgctgctgcagcaggcgattttcgcgggtcagccgcgcgttctcatccagcagggtcagcgccaccgcaattcccggccagtccagctccagctcgttacgcaggcgtaccgcgcgatgcacgatcgttaccgcgctgtcgtcgaacagccaggtgtccgcctgcggctggtgtggctcaatcatccctaagccgacgatctccgtcagctcctcttccgacaccccggtacgcaggcacaattcggtaatggtaaacgtcactgttactgtagccatcagactttcccccatgtcttacgcggatcgaagctggcttcggcggcggccaattgttgccagagctcacgcgctttttcatctggttttggcggcatcactattttaataacggcgaacaaatcgccggtgtgggttttgctcacgagtcctttccctttgatacgcagtcgctgccctgcctgactgcccggcggcaccgtcagcagaatgctctctttcagggtgggcaccgtcactttcgcgcccagcgcggcctcccatggcgccagcggcaggacgatctccaggttatgaccgacaatatcgaatagcggatgcggggcgatgtggataaccagccacagatcgccgttcgggccgccattctcccccggcgtcccctggcctttcaggcggatacgctgaccatcgactaccccggcggggatcttcacattcagcgttttcggcgtttcgctttcgatcatgccaaacacgttgtacaccggcaggttatagctgatggtgcgcgtctgctcggccagcgtctcttcaaggaacaccgccacttcgatctccagatcgtggccgcgcgccgcgtgttgacgacgacgctgatgcgtctgctggccaaacatggaggagaagatgtcgtcgaaatcttgctgactgtagctctgctcgtgggtctgtcgctggcgaccgaagccgggatcgttgcgatgctgccagagctgatcgtattcggcgcgccgttgctcatctttcaggacttcccaggcttcggcgagatccttaaatttggcttcggcatcgttttctttactgacgtcggggtgatatttgcgcgccaggcggcggtaggcggtcttgatggttttcagatcgtcggttggttgcaccccgagaatggcataataatccttcaattccatgatcttatctcatctatgctcagtgcggtggttacatattccctggaacaggcgtcagtataaagcgtagggcaaatgcgccctgacggggaagaaaagtggcggaaacttgacgccgtcggggtcgacggcgccgtggataagattagtctttcgcctgcggccgtgggcggcggcgccatccggtgaatagcaccagcagcgcgccgacggcgccagccaggcgcgcggtgccctcgccggcgctgggaaacagctggcgaatggtagggtcgctgaccagcgttgacccggcaatccagccgatgagcatcccgcccagcagcaccaccgcgggaaagcgggtgagcaggaccagcaccagcttgctgccggcgacaataaccggaatgctgatcgccacgccgagggcgaccagcgcaatgtgccctttccccgcagcagctaccgccagtacgttatccagcgacataatcacatcggcaacggtgatggtgatcgcggtgcgccacaggctgccagagctgctaacctcgctctcttcttcctcattcctgaccagcttgatgccaatccacagcaggagcagcgcgccgactattttcagccacggcagcgacaggagatacaaagcgatcgccagcagcagaacgcgcgccaggatggcgcccacggtaccgatgatgatcgctttggtgcgtttctgcggcggcagtttgcggcaggccatggcgatcaccacggcattgtcgccacccagcagtaagtcgatggcgacaatctgcagcataatcactgccatgtcccattgttgaagaaatgcatacatatcgagagaaaccacctgaaaaaagagcaagaaaaaccgctgcgcagggtactccgcctgggccgcgttgaccactggcgcagacctgcgctatcgcgcgggaaagagagagcctgaaaaataaagttacgaatcaaggcgccgttgggcaaggcttcggcgaaaaagggtgatattttgtcacccagactcacctgccgttcacttatcgcaaggatccccactatgtctggccacaagaaatacctctctgtcgccctgctgagcgctgtcttactgccggcgatggcctctgccgctgacgcgccggcgactttcaccccggaacaggaggcgaaaatcggcaaaatcgccgccgactatctggtcgcccacccggaagtcctgctgcaggcgagccagaaactgcagcaaattcaggctgagcagcaggccagcgcggccactcaggcggtgctgaagaacgccgccgtgttgacccaggataaaaataccccgacctacggcccggccaatggcaaagtcacggtgatcgaattcttcgactaccagtgcgtctactgcagccgtctggcgccggtgatggagcaggtgattaaagcgcacccgcagacccgcttcgccttcaaagagtggccgattttcggcggccgctgggaaagctcgctggaggcggcaaaaaccggcctgcagatctatcaacagaaaggggcggatgcctatctggcctaccataacgggatttacgctaccggccataacgaaggcaagctgacgacggcggatatccagcagcaggcgaaaaaagccggctttgatgcgaagaaggccgccgacgtcgaaccggtgctgcagagcattaacgatctggcgcaggagattggtctgagcggcacgccgggcgtgatcgtgatgccgaccaccggcgccacggaagccagcatcaccgtcttcccggggctggcagacaaagcctcgctggaagccgccatcaaaaaagccggcggctaatccccggcgtattacctgtccaggccgccgacggcggccttgctctcatgcgtcatcgctctcttcctgcggcggcggtaacgcgtggctttttaaatcaataatctgcccgatttgatcgtggtaaacggtgagcaaattatagcggctcatctccgagataatctgcggcgcgacgttaaagctgctcgccagctcatcgtcgcgcagagcgagcaccgcggtatgacgccgggtacgggcgcggcgccggttgtagtgataccagaggatcaacagccagccgttcagcgcggcaatcagcagatacaccagcgccgtattcagggagtccatcagcgattcccagcgcggagagggcggcgcgatgaactgcatcagcaaattggcgtacagaaagaacagaaaaccgagccaggccagcagcgttaagccggcgtcgaccagccggggtagcacccgatgttcggttaagatgagcgtattttcattcatcacaggcttccttttccccggtccggactcacccagcgcgcgcgggaacgttgacgtttcaccatcactttcggaaaagcgaccagcgtggtcagcaggccgatcatccagtagaccatcgggaaccagatcacccagaacagcgatttggcgacctttttctcatagcgccgctcgatatacaggctggcgacgaactgcagcaggcacatcaggccgagcagcatgccggtgaattccggtggaaacaggctatgcaccgccagattgtcaggcagcggcatcaggcggctgaggataaacagcagaatggtgatcgcgtaggcaaaggcccacagcgtggagcaggcatactccagaaacagcggccacatccggtgatgctgccagtgaaacaggcggcgcagattgaccagaaagacttcggcgccgccctgggcccagcgcagacgctgcttccataaccctttgagggtctccggcatcaggatccagcacagcgctcgcggctcgaaaaagatgtcccagtggcggagctgaagcttccagctgatatcaatatcttcagtgatcatatccgggctccagtagccgacgtccgccagcgcctggcgccggaaggcggcgattacgccggagacggtaaagacccggccatagatccgctgcgtccgtttgataagcccaatgatcgacgagaactccccaacctgaatgcggccgatcagcgtggatcgggtgcggatccgcggattgccggtgaccgccccgacgtgcggataatggatcaacggcgcgaccagccaggccgcggtatcccggtccagcagggcgtcgccatcgatgcagaccagcagatcgccgcgggcggcggcggcgcccgctttgagcgccaccgcttttccctgattggcggccagatggatcacccgcagcctcggctcctcctgcgccagctgctggagcacctgggcggtgttgtccgaagagccgtcgttaatcgcgatcacttcaagattggcgtaacgctgggccagcgctgcgctgatggtttcccgggcgtttttctcctcgttaaagcaggggatcaggatcgagatcagtggattgcccggcagcgtcggcggcggggtatcctccccccacggccagtgacgttccagctgaaaccagaagtagagacccccggtgatccacaacactgacataaacagcggccagaaaaagacaaagtcgaggataagctcgccggtaaataccgctgcgacacctaacggcagcccgaatacgaggcataaaatgcacaatgcgataatgcgatcagtcatggtcagggtaccaccaggaagaaaattgcggcctgatacgagagatatcaggctggttgttaataaaatcgtcagggtagtagccgtagtttttgacgccgttcagccgcagcaaacgcatccagtccgccagctgctggtcgggaatggcgttttgctggcgtcgattccagtctctggcctgcagttcaaagatggttttcttcagcgcgcccgggtggcgggcgacggcctgcaccagccgcgtcagccaggcctggctggcgtcgatcggcacggactccatcagcggcatcgccatggggaccgtccagtcataggcggcaaggaagtcatccagattctgcgcaaaccaggcttcgctttgcggctccaggatcggcagggcgaagagattacgcgccgttttcacctgcgggccgcggatggcctgcactgcctggcgtagatccagagtgaagcgggtcagggtttggcttttgaaacgcatccatgcctggcgctcttgcggacgttggggcaccggggcggcatcgtgcgccatacccgtctgccgccaggcggcgaccgcctccgggctcacgtcttcaaaatcggtcaacacggcgtcgtcgtgaaacagaatcccgctgaagctggcgtgtcgggccagatcttcgtagatgtcggtgatctgctggcgaacccggggatcccagggcgacagacggacgtacggctggcgggcaagtaacgccttcccggtttgcggatcccagcgctgaacgcgcggcagatctgaggcaagatcgaaggccagcaccggcatccaggcataaaccttcacattgccgcgggtctgcaactgccaggagacgaagttaaacaggtcggcgcgcatcggcagccagcggttggggaaatagagcgacttgaccgtgccgtcgccctgcgggtcggagaaggcctgcagaaagacgtggctgattttcatgtcatagacgcgctgcaccagcttatcgatattctttgcctgctggacgggattggggtcatagacatagtccagatccacatgcatcacccgaacaggatcggcttcctgaatctgggtcacggcgctggcaaaggccttgagcgacgggttaccggcgatcagcaggcgtggaatattgtccagatccttcacgttgcccaggccgtcgttcagcgtaaacgccagctgatacccttgctgtttggcgatagtcagggtgctgccgctggcggcgccgtagggccacacccaggcgcgcggcgttttcccggcaacctcatggattttcgccgtcactttctgcacgtcatctgtcattcgccgggtaaactgcgcgtcgctttcatagcggccggtggttttatcccagccgcggttggcggcggcaggctcgcggctgccctgcggattggccggcagaccgtagtgcgaggcccaggtgtgagcgccgatctccaccagcggcgagcggctgagctcgcgcaccatctcccaggtagcgaagcgctcgcgcggcgtcatcaggccgccaaaattaacgggctgaccagcgggagtgtccacccagctgcccaccggcgcccacagcgccgggacgttccaggctttaagcagcggccatacgcgggtgtaaaagctgctgtaaccatcgtcaaaactgaggagaaaagccttgggcggcagcgactttaagccataatgcgcatcgagaatgtcctgaacgctaatcgcatggtagccgttatgcagcagccaggcgatctgctcattgagtgcgctggtgcgcaccgaaagataacgctggtcggcggcatcgtcttcgacgtcatggtaggccagcaccagaaagcgatccgccggccagggttgattggcctccagttgggggcgctgctgcggggcgaggaaggggacttcctcagcacgcacgctgaagataaggcacagccagatgagaagcatcaggccgttgcgcagggtcgtgttcagcatggtcatccttaaaaccgtatatttgcatcaagagtgatggcgaggttgttttcacgtttgccgtcgtaggggcgcttatcccagttcagcatcaccccggtgtcgacgacgttgttccagcgcaggcgctgcccgtaacccagcaccgtgatcgccccggcggcgtgatttttttgccagtagctgccgccgccggcgagtaactgctggctccagacggtgtcatagcgctggtaaagcgtgtgatcgacggccagcgccgcggtggcggcgaggtcccgtgccggactgtagtaggcggtgtcggtgcggctattggcgctggccgacagaccgggctgcaaatccagcgttaaccatggggtttgccagaggcgttctttaccggagagggtgtactcatggcggcggttgcgatcggtaaaccggctggcggccgcgctgacgcggtactcccggcgttcgtttggagaccagcgcagccagccttcgccgcggttggcgctgacgccgttgcgtaacgcgcgcagcggcgtctgctgcgaaatccgctccagttcgccgcccagctgccagcgatcgctaacgtcatgggcggcggaaaggcggacgccgggcttgttctcgccgtgaaaattgacgctggagagctcaagctcgccccagtagtcgcgcggacgccattcaataccggcaaacagctggcgacggctgcctttcccctcttcaaaattgccttcagcgaagcggtgcccgccgaacaaccgccagctgtcggctagcggcgggctgtagatcgccgtctcaaaactgaggtcgtgcgtgccgctcaccgggttgtcggaatgcagccctttgccaacgctcaggcgcagctcggagagatgatggatctcgcgcgctctggccaggcgctgggtgttcagatcccgtggcgagcgggcgacgacgtcgtcagtcagcagatccatttgccgccactcctgcagatcgagggcgacccaggcctgctggcgctccagctgcaggctggtgggttccagagattccgccgcttttagctggcgttcggctgcccgtggcaatcctctctcctgcagaagggcggcatagtctatctgcaggccctggtttccaggggccgtcgccgccaggcgctgcattcgggcttcggcctgcggcaggtcgttggtagccgctaaatagtgcacgttaagcgactgtgcggtgagccagtcgtcgttcggctgcggcgttggcgagccgtagagacgacggatgtagggcgcattcctggtgaggcgggcgacataccgttgcgcctccgggtactgaccggtgtccagcagagcgtagaaaagctcgtgttcctcattctgttggcttgtcagccacgaaggatgctggtggataagcgtcagcgcaggctcaatttgcttaagggcgataaaagaggagatgacccagccgatggcccagtcgggaacggtctgctgctgggcgatcaggctttggtattcgcggatgacctgcgcgtactcggcgctggcgtacagtgcgcccagacgatcaatacgcgcccggatgatgtcgggcgcagcctgtgggtcggggtgccaggcggcgatcatcgcgtcatactgcgtgagcgccgtgcgggccagcgcgtaacgcgccttttcttcgcgggaaggggtatcggcaaggcgcaccagttcggcggcggcgttcagctgcaagttacgcttttccgcaggcgtcagttcgacgctattcgccaggccgagagcaggggaatcaatccggttgcgggtcagggtcgccatcaggctggccagcgcggttttgttttgcggttcacgatcgaggatctgcgtgtccaccaacagctggtcccagcttttgcccagccgcaggtagacataggagagcgtctgcaggtgcgcaacgctcgcctgctccgccaccaggcgacgcgcttcgctgagcgcctcgccgtccttgcgggcatcggcgagcgttttgatatagccgatacgatagtcgtcgctgccaggggcctggctgagcgcctgctgccagagggtgagcgaggtttgccactgcttctggttgcgcagggcctgcgccgcggcggcggtgccccgtgcgggaagcggcatatagacctggtagcgtcgccagactttcaccacttcatcgtcctgaccggcccagagggccacctgcagccagtccgccacctgagaaggggttaaggcatgccgcagctggtactgctgaaggtaactgagaaagggggcgtactgaccttggcgcgcttgcaagatttgctggtcatagagtgaatccgctccctgaaccagcgccgggaagagcaaaagcaagccgattgatagcgagagtttcgtgttgcgattaaacaataacgtatttgaataaggtgatctttccatttctatttgccatatgttcatcaagaatccattgcacaacacgaccgtcctttgacggtgagttaaaggatgaggatggtcccatttagctgactggcactgcaggtgaatgacctattgcaaactaataaacatatctcctgttgataaatgaatgggtaatttatacccgatacggcaaccgataaatatggataaattatggtctgcgttttaagataattctgtaaaatcgacttcattcgaacgggagtgttcaagttgatttctttaacctactgatataaataaaaaagaaagtcaggtggaattttgtttcaaaatggcggtgtgacttatatttagttggggttagagttttttaggcaatatttaagatgatttctgacaaaaattctcaatagcaaaaaaagcatcttttctgtggattttttttatttataatcaatctgtttatttcctgtcagaacgcaaggagggttttcacagccagattcagatgccgcgctaatgataaatcacaggtctcgttattttcaccgccatgcgaagcgttccatagggggagggaaaacgtctggttgacgagaatttgttgattaaatgttaaagggacgatttgtggcaactttaatgatattggttacccaagattactatctttttcaaggtgttaagaatttttttcctgatatcattcagttagattctagcggaaaagcgattttagataatgaggttgatgaagtctctctgctggttgatagccgctcgccgctttgccattacgattatctcgtgctggcagcggcgaaatccagaaagcgaatatgttgtatcgtcctcgatatgcgtcatcgggaagagcatttactgagcctgaaatcgtttttaaacatgtcattatcacccgcggatatggcgacattatttggcctttttctggagatgaatagcaagcgtctgaccaaagagtggtttgacgatctgcgcttaagtttgtctgaacagttaatgttacgtttactcatggcggggatgaccatggaggaggtggccgtcaatctcaatacgtcactaaaaagcctttaccgcaagcgtactgcgctttatgagcggttggggttagataattttaatgaagcttgcttatttatctttcgaaataagctgctggagcagaccgaacgttcgttatgaagcttcgctgtacagagaatggatgttatcgcaaggtatttgttgacgaaaatctaataaattaaatagatattgataggtacaaccgtcgatacccggcggtatcgatgatggcattaggcatataattccggagctctttggaagtatttaccgccaatgcggtttgctatgcacagcgattattataatgaatatattccttgcgccgcacaggaatagttttgtcataaattaacactaccatggtattccgactcacgcgtcggaataccatgagatatcgtgaaagcatcagaggagcgaggtggatgagaataagggacagtattgctgagcggttagaggcatgcgggctctaccgtcgggcggcatccagatggattgaggtgatgcagcgttgtctggacgatgaggaccgagagtggatccgtcaccatcgcaatcagtgtctgaaaaaggcgcaacgtccgccggcgccgaaagaggagtttgccgacctccaccaggcggcgaaagagacgcaatatcgtatgggcattgcgaagccctatggcgaagcattcaggctgcccggcaaagggaaaacggccgccgagtaatgcctttcttcacgacgtttgcctgacggcttcgccttatccggcctgcgggtcctccacaggttcaaacagcgtaggcccgcgcaagcgcagcgccgccgggcgatacacatcagataccgtactcgcggttgtgccggatggcggcataaatgccttatccggcctacgggtcccccacaggttcaaacagcgtaggcccgcgcaagcgcagcgccgccgggcgatacacatcagacaccgtacccgcggttatgccggatggcggcataaatgccttatccggcctacgagtcctctgctgattcaaacagcgccggcccgcgcaagcgcagcgccgccgggcgatacacatcagacaccgtacccgcggttgtggcggatggcggcataaatgccttatccggcctacgggtcctccagaggttcaaacagcgtaggcccgcgcaagcgcagcgccgccgggcgatacacatcagataccgtacccgcggttgtgccggatggcggcataaatgccttatccggcctacgagtcctctgctgatacaaacagcgcaggcccgtgcaagcgcagcgccgccgggcgatacacatcagacaccgtacccgcggttgtgccggatggcggcataaatgccttatccggcctacgagtcctctgctgattcaaacagcgtaggcccgcgcaagcgcagcgccgccaggcagggggtgatagaacggagttcgatgaagagtccggatgtagaaaagcaaaaacccgccttttgggcgggttctttaaatagtggtgcccggactcggactaacgccgcaggcgttgaacagcgcgcttgccgcgctggccccgaaggggtgagccgctgtgcggcgaataatcgaacggagttcgatgaagagtccggatgcagaaaagcaaaaacccgccttttgggcgggttctttaaatagtggtgcccggactcggaatcgaaccaaggacacggggattttcaatcccctgctctaccgactgagctatccgggcaacggggcgcattaaaccgtaatccgcccaccccgtcaaccaaatttcttaaattacttatcgattgcttatctttgcggcaattctgcgttcaaaggcgcgttttggcttaacttcactgcatgccgttatcgccctcgcgggttttccagccgctggtaatggcgataacgtggcgtagtccggagatgagataatcgccaatgacctcctcgtcctcacgcggcgagctcagggtaatttccgcatccacgccgtggcgataggcgccatgatggctgaaaatggtgccgatataacacttcccgttcagccagaccggaatataggccaccgtctcatagatatagttaacggcgacgccgctgtagtagttatccgcctcgtcagcggaggtgcccggcgggatggggcagatcggcgcgtcgttgtcgctggcgggtctgtctttcagcaggctgccctgcattacctccagcgagcgcagcaggtcagctttatcgccgtcgctcaggctgggggtcagcggctggtctttctccggggagcggatgctgttcagcgtatagcgatagcgaaccgtcaccgcgggcgtctggctggtggtgctgaacgggcgtagcaggtagaggttatcttcgccaaactggccgttgtaccacagggcatacacctggccgttgattttgacccagtggttccactggttagccccgcggccattaatggaaaagagggcgccgggcaccccggcatcgaaatcatcaccattatcactgtcgctgccgttgacggcggcaaaatcatcatcacctcgcttgagcaccccggtgtagctgaagagcccggtgccgcccacgtagctgtcgatgatcagttcgcgtttgccgtcgccgtcgaggtcgataagggtaaagctgactttgccgttttctgaatccgcgctaatcgaggagcgcagaaacgcctgccactcatcatcgctgatatccggggacggtttactggtcgtgatcagcgtatcgtcggcgtaagtgagcgtgaagtcggtaatatggccggttaacggaaactgctcggcgaccttattcagagacaattctggatcgcttttttgcgctttcaacactgcgttatacaacgtgcgcagagccaggttatccgcctctttctgctgcctggggatcacctggctgacaaaggtcggcagcatccaggtgccacccggggtgatttcccgacacataccggtgctgtacttcaggctgggggtaaaggttttaccatcccaaacgcgcgtctcgccggtgacgcagtcggccatgccccgttctttgtgcaaaaagacgatagcgccgtcggcgtagctggaggcctcggtagtgagcagccgcggtttgctcaactgggcgttatcgaccagccacagggcataaccgtcgttatagggcgctcgccagcagagcgcctgcgccagagaatgggttttatccagcgcggtcagcgtgatctggcgatctgccgccggaatggcctgattctgccagtcgtcgcagcgctggttcagcagcggcgtcaggatgggcagcagtttctggcgctgaagcatactcaacggcactggctgcgcgttatggagaaccggggcggcgataatttccggggcgggagtggctggcaaaatggcatcgtcgccggcatcgcctttatccagcagcgcatcggcggtgccggtgcgtcgctgaaacgcatccattttacccagcacctcgcggctgccggcgctggaaagcggcaggtgctggccgttaagggtgaattcgattttgcgctgattcgttaacgcctgtagcagggcggtggtctgatcgctgtcgaggcgaaagtggctctcgtcgagagcgtccagcgcgccaaaatcccggtcgtcgatcagcaggctggcggtggagtcggcggggatatcgtgctcgatttgcgcaaaggttaccgtggcggtgaggtgctgttcgctgcccgcgttgcgggtcaacagcacgctgacctcacccatgcggacgccgtaacccgccgcccggcaggcgccggtattatcgcaggcgagctcccagtctttttgtgcaaaggaaaaaccttgcaggggagccgccagcaggggcgtagagcagaggcccagccaggcagcccagaagaacgcgcgcatatcaatccctgtcagcaatcagtgagggggaaattataggcgcgacgtggcggttaggatatcagaatcaggtcaaggcgccgcccatacggcactgggcgaagcgtagaatatcttcagccagccgccgggcggtatccacatccgtctggctacgtttgaccagcagacggctcagacagccctcgacaatcagctccatctgcttggcgaccatttccgggtcatccacctccagctgagtcagcagctcgtgagtgtaggccagcgaagcctgcttctgctgttccgccagctggtgaatggggtgctgaggatccgggtagaaggtgcaggcggcgataaacaggcagcccgggtaccgctggttgcttacgcaggtggtgagtgcggcatagcgtgccagcagcttttgctctgcgcttaaggtctcgtccagcaggagctgacgacgccaggcatccacctgctggctcagatagcgaagcgcgtcgtacagcagcgcttcgcggtcaggccagaagcgtttcaggtcgctcgtcgggcaggacacgcgctcagcgaccatctccagcgacgtgttggcgataccttcaatttcaagaatcttaatggcttctgccaggacgtcttcacgtagcacggtgttctcctccatctttcctcctaaagtgtcgctcacgcttgccaatcgcgcaaatgggcgctgaatgccgcggcatccataaagccggtgactcgccgctcaggctgttcctgaccctcagcgttgaagaacaggatcgtcggcagacccagcacctgcaggtgtttcagcagcgcgacgtcttgcgggctgttcttcgtcacatcaacctgtaataacacggtgcctttcagcgcctgctgcacgtcaggtgaactaaaggtgtatttttcaaactctttgcaggccacgcaccagtcggcgtaaagatcgagcatcaccggttgacctttcgcctgcgccagcgcctggtcaagctcggccaccgagctgacgcgggtgaaagccaggtgcgcctgctgctcaaccgccggggcgccaaacgcccagtcctgcagaggccgcgcgctgaccagcgcggcggcaagcagaatgatctgtaccagccgcatccacggccgggtagcgcccagagaggtgataaacgcccagctgaagaaggcgacaccgagcattgaccacagccgtaacccccactggtcgccgagtatgcgttccagcaggaagacgggcagggcaaggatcacaaacccgaaggcggttttcacatggctcatccacgggccgcttttcggcaacaggcgattgccaaacacggtcacaaggatcaacggcagacccatgcccagcgcgtaaaggtacagcgtgccgccgcccagccacagattaccgctctgggcgatatacaacagaatggcgcttagcggcgcggtggtgcagggggagcagatcagcccggcaatagcccccatcgcaaagaccccgccgggcgagccgccctggcgcttattgctgagcagcgtcagccgggtctgcagcgacgacggcagctgcagcgtgaacaggccgaacatggagagcgccagcagtataaacaccgccgacaggccgaccaggacatacgggtgctgcagggccgcctggaactgcagcccggcggcggctaccaccagccccagcgcggtataggtcagggccatcccctggacgtaaataaaggccagcagcagggcgcgcgcggtggaaagccgctgttttccgcccagcacgatgcccgaaatcagcgggtacatcggcagcacgcagggggtgaaggcgataccaatacctatcagcagcgcccacagcgccgtaaagggcaggcgggcaggcgtgtctgcaggcggcactgcggcaggcgcaggtgatgtggcgagctccggggccggtcgcggctcaaccggcagcggcgggttgaacgccgggcggctgctcgtcgacggcatgggctcgatggcggttgcctggccgtcgtttgaggccgcctgcacggcgctcagcgggatcactttagtctccggcggataacagaatccggcatcggcgcagccctgccaggtgacggtgagagtagcctctttgtccgcctccttcaccgtcaccggcacggtcaggcgttggcgaaagatctcgcttttgccgtaaaactcatcttcatgccactctcccgccggcagcgccggttcgtcgatcgtcgccccggcggcgctgaaggtaaactgttgacgataaagataataaccatccttgatttgccagctcaggttgacgtcatgctgttgctgctgaaagtcaaaggcgaaagcttgatcagcaggcacgaagttcgagcgccccggcgcgtcgaataacccggcggtggctgatgtgctgcacagcagcaggatcagcgtaatgatgcggtaagccatgagaggtaatcgttgtctccatgcgtgacgggtagaaccagcagttctggggtttgatacgggtggtgtgacttcaggcagtccagcagcgcctgctgatgggcaaggtcagttttgagtagcatctgcacttcatactcctgctcgagtttcccttcccagtaatacagagaggtagcccccggcagcagcgtggcgcaggctgccaccttttccgccagcgcttttgccgccagatcctgggcggtcgcttcgtccggcgcggtacagagcacaacaacagcatcaggcgtagtcatcatgaacctcgtatcagcgaaaagaggcactataacacgcaagatgcggggatattagcgtaacgagcggggaaagtgagggcaacggaaggcgggcccgtagtgggcccgccgccagcggtatttacagcataatcccgccaaagataaagccgaggatcacgcacagcgtgatagcgataacgccggggatcaggaaggcgtggttaaagacatatttaccaatgcgggttgagccggtgtcgtccatctctaccgccgccagcagggttgggtaggtcggcagaacgaacagcgccgagaccgcggcaaacgaggcgatagccgtcagcgggctgacgcccagcagcagcgcggcaggcatcaacgccttggtggtggctgcctgcgagtagagcagcgtggcggcgaaaaacagtaccaccgccagcagccatgggtaattatgcagcagatcgccggccacggcctggatgtcgctgatatgcgctttaacgaaggtatctcccagccaggcgacgccgaggacgcagacgcaggcgctcatcccggacttaaaggtgctggcgttgagcacttcgccggtgtcgattttacaggtgatgctaatcagggtggcgatggtcagcataaataccacgatcgcctcgttacgcggcagcaccgggttcttaatcaggccgacggtatcgctgatggccgtggcgtagaacattaccgccacgatgccgatcaaaaacagcagaacggaacgtttggcgtgcggctgcagctcaaatacctggctgccgcgcagtctgacttcccccttggccagccgctcctggtaaaccggatcgtctttcagttcgcagccgaggaagttgcagacgatagcggtgagcatcaccgccagcagcgtgaccggaatacagatggccagcagcgtcaggtagctaacgcccagcggctcaaggatcccggcaaagaacaccaccgccgcggagataggcgaggcggtgatcgctatctgagaggccacgaccgcaatcgacaggggacgagaggggcgaatgccttgctctttggcaacttcggtgatcaccggcagcgtggagaaggcggtatggccggtgccagcgagcacggtcataaaccaggtcaccagcggggcaaggaaggtaatgtacttcgggtggcggcgcagcatccgttcggcgaggctaaccaggtaatccatcccgccggcgacctgcatggcggcgatagcggcaatcaccgccataatgatttcaataacgtcgaaggggatcgcacccggtttaatttgaaaaataagcgtcaggacaaggacgccaaggccaccggcaaagccgataccgatgccgccgagccgggcgccgagataaatcgccagcaggacaataaccagttctgcaccaaacatatatgccttccttgttttttaacaagttgatattgaattgttgtattttagtaaaaccaaaaagcaaaaaaggcatgtcatcgctgacatgcctttgaatgactaacctgaaagattactgttcgctttcatcggtataacgctttgctttataagcgggatgcatcaggttttgcgcagagaaaatatcatccaactccgccgccgtcagcagtccgcgctccagcaccacttcccgtacgctcttgccggtttcggcacagatcttgccgacgatatcgccattgtggtggccgataaacgggttgaggtaggtgacgatgccgatggagttgtagacgtagccttcacataccgctttattggcggtgatgccgttaacgcatttctccagcaggttgtagcaggcgttggtcaggatatgaatcgactcgaacatcgcctggccgattaccggctccatcacgttcaactgcagctgaccggcttcggaggccatggtcacagtggtatcgttgccgataactttgaagcagacctggttgaccacctccggcaccaccgggttaaccttcgccggcatgattgaagagccagcctgcagctcaggcaggttgatttcgttgaggcccgcgcgcggaccggaagagagcaggcgcaggtcgttacagatcttggacagtttcaccgccaggcgtttcagcgagctgtgaaccataacgtacgccccgcagtccgaagtggcttcaatcagatcttccgccgggacgaccggtaagttgcttacttcagccagcttctgcaccgccagctgttgatagccgtccggggtgttgaggcgagtaccaatggcggtggcgccgaggttcacctccagcagcagctccgcagtgcgcagaatgcttttggtctcttcattaagcagcacattgaaggcatggaactcctggccgagggtcatcggcaccgcgtcctgcagctgggtgcggcccattttgaggatgtcctggaactccacggctttcgcctggaagccttcgcccagctgtttaatcgcatcaattaacttaaggatggaggcatacaccgcaatgcggaacccggtggggtaagcatcgttggtggactggcatttgttgacgtgatcgtttgggttcaggtactggtattcgcctttctggtggcccatcagctcaaggccaatgttcgccaggacttcgttggtgttcatgtttacggaggtaccggccccgccctggaagacatcgaccgggaactggtccatgcatttgccgttattcaggacttcgtcacaggcggcgataatcgcatttgccgcgcttttgggaatggtctgcagctccttgttcgccagcgcggcggctttcttaaccatgaccatgccgcgcacgaattctggtatgtcgctgattttgctgttgctaatgtagaagttttcaatcgctcgcagagtatgaacgccgtagtaagcgtccgcgggaacttccctggtgcccaacagatcttcttcgatacgaatgttgtttaacatgtgaaccttcttttcaagctgccaatgaattcaccaaacacacagaatatccagtattcagtatattttctggccgacgattatttccttaaccggcccggtgcccaagatcatatgctgatgatagcgaatatcagtaagcttgatcacttattacattgcgggtatgagaagatttattaatctgtgaaatgggtcaccgctttcttattcctgagaaaaataagcctttccgctgattgaaaagccgctcagcatccccatgttagtgggatgcgatcagcaaattgatgattacgggcgctgaacgcagcgcccgttgatgaaggagacgccggtgcgttggattccgtttattgccttttttctttacgtttacattgagatatcgatctttatccaggttgcgcacgtgctgggcgtctttatgaccctgatcctggtgatctttagctcggtggtagggatgtcgctggtgcgtaaccagggcttcaaaaacttcctgctgatgcagcagaagatggccgcgggcgagagcccggcggcggagatgatcaagagcgtatcgctgattatcgctggtctgctgctgttgctcccggggttctttaccgacttcctcggcctgctgctattgctgccgccggtgcaaaagcatttgacgatgaagctgatgccgcacctgcgcttcagccggatgccgggcggcggctttagcgccggaactggcggcggagagaccttcgaaggggaattccagcgcaaagatgagcagcgcgaccgtctggaccataaggacgatcgccgcgattaacatcccccggcccggtcagcagatgcgaccgggccgctttctttgcaggcctacacgcttcccgtcgccagcttgcgcctgggtaaaaacagccacagccccgccagcatcaccagcgcgtacaggcttttccagccgaccatcgccagcagcagcagacagagaatgctgcccaccactgccaatagccgatagcgaccgcgaagcaaacgacaacccgccagcatgcacagcagatagatcatgatgaaaatgccattggcgtaaacgatcagcgcgtccagattgatatcgagcagatagatgccaagggtgctaactacgcaggatcccagcacggcgttgagggcgttgcgcgggatctgccgtggcgacagccttgcgaggtagctgtgtggcttatgctgcgcttgcgaccagaccaggcgggcgaagctttgaatatagatgttgaggctggcgaaacaggcgagatagccgatgacgcaggctacccacagcgcttcgacgccgaacagacggaccacgatattcggtaatgacgccgccgccgccatctcctcgccaaaggcgtggaagtgcagcaccagcacggtgcaggcccagtagaccgagccggcaagcagcaggcctatcatcagcgccctggggaaatcacgctcgggatgtttaaactccgaggcgagatgcgcgaaggcttccagaccgacaaagcaccagaacatcaccgacagcgccaaaaagagctgcccgcggtcaatctccgccggggccgggaaggggatctgcgccgggcttatcccgccgcgccaccagactacgacgatcagcgccacaatcagtacggcaaccaacgtctgcaggttggcgctggagctggcgccacgcgaaccgacccaccagacgatggccagggtgcccagctccgccagcagcagctgcgcatcatgccagccgaacagcgcctggccaaaaccggtggcgatgtgcagggcggcggggagtccgaccgggataaccgataaaaacagccagccggtgacgctggccagacgtggcccaaaggccatatcgacaaagtgggccacgccgcccgcgctgggaaaatggcggccgagcagggcgaagacgatggcaatcgggaaaacaaggagaatgagcagcggccatgcccacaggctgttatcgccagcgaccagcgccgggacggcgaagacgccggtacccagcaatgaggtggaaagcaacccaactccctgtcccagccctaactcctgttttaaaccactcatgattcaatcctgcgccagtgaaaaaaaagagagtatcacaatcgcttttccttatgaccgattgcctgacatggccgctttttgtgcgccagcgcaaaggtaaaaattttttttaattttgcccttgaagccgtaaatggccatccccatctctctctgcactagccggtaaaccgcgttcggcccggcgtcacccataactgataatgactttctcgaaggagagctatcaatgagtattcgtccgttacatgatcgtgtgatcgtcaaacgtaaagaagttgaaaccaaatctgcgggcggcatcgttctgaccggttctgcagcagctaagtcaactcgtggcgaaatcatcgctgtcggtaaaggccgcatcctggaaaacgggaccgtgcagccgctggacgttaaagttggtgacatcgtgattttcaacgatggctacggcgtgaagactgaaaagatcgacaacgaagaagtactgatcatgtccgaaagcgacatcctggcaattgttgaagcttaattcgcacgaccctgaacgaatttgaggaataaaagaaatggcagcaaaagacgtaaaattcggtaacgacgctcgtgtaaaaatgctgcgcggcgtaaacgtactggcagatgcagttaaagtgaccctgggcccgaaaggccgtaacgtggttctggacaaatccttcggcgcgccgaccatcaccaaagatggtgtttccgttgcacgtgaaatcgaactggaagacaagttcgaaaacatgggcgcgcagatggtgaaagaagttgcctctaaagcgaacgacgcggcaggcgacggtaccaccaccgcaaccgtactggctcaggctatcgtgaacgaaggcctgaaagctgttgctgcaggcatgaacccgatggatctgaaacgcggtatcgacaaagcggtactggctgcagtagaagagctgaaagcgctgtccgttccgtgctctgactccaaagctatcgctcaggtaggtaccatctccgctaactccgacgaaaccgtcggtaaactgatcgcggaagcgatggataaagttggtaaagaaggcgtgatcaccgttgaagacggtaccggtctggaagacgaactggacgtagttgaaggtatgcagttcgaccgcggctacctgtctccgtacttcatcaacaagccggacaccggtgccgttgagctggaaagcccgttcatcctgctggctgacaaaaaaatctccaatatccgcgaaatgctgccggttctggaagccgtagcgaaagctggcaaaccgctggtcatcatcgctgaagacgttgaaggcgaagcgctggcgaccctggtggttaacaccatgcgcggcatcgttaaagtggctgcggtgaaagcaccgggcttcggcgaccgtcgtaaagctatgctgcaggacatcgctactctgactggcggtaccgttatctctgaagagatcggtatggagctggaaaaagcgactctggaagacctgggccaggcgaaacgcgtggttatcaacaaagacaccaccaccatcatcgatggcgttggcgaagaatccgcaatccagggccgcgtagctcagatccgtaagcagatcgaagaagcgacctccgactacgatcgtgaaaaactgcaggaacgtgtcgctaaactggctggcggcgtagcagtaatcaaagtcggtgcggctaccgaagttgaaatgaaagagaaaaaagcacgcgtcgacgacgccctgcacgcaacccgtgctgcggttgaagaaggcgtggtggctggcggcggcgtagcgctggttcgcgttgcggcgaaactcgctggcctgaccggtcagaacgaagatcagaacgtcggtatcaaagttgcgctgcgcgcaatggaagcgccgctgcgtcagatcgtttccaacgccggtgaagagccgtctgttgtggcaaacaacgtgaaagcaggcgacggtaactacggctacaacgcagcaactgaagaatacggcaacatgatcgacttcggtatcctggacccaaccaaagtcacccgttctgcactgcagtacgcggcttccgtggctggcctgatgattaccaccgagtgcatggtgaccgacctgccgaaaggcgacgcgcctgacttaggtgctgctggcggcatgggcggcatgggcggtatgggcggcatgatgtaatcgtgcgctctacggcataaaaaagcagaaacccctggccagcaatggctgggggtttttcttttggcgcgctttttagtataaggcttatacataaaaatcatttaagctgcatcagagcggcaagcacctccgtttcggtagcgacctggtaagcgcagccggggagggaatgaacgcggctcatgccgacgcagtttgaaggatgacagatttacatccgggccagtgcgtccagctcatcgatcatggggaataacatgcaggtaaaatatttagcagggattgtcggcgcagccttactgttggcaggttgcagttccagcaatgaattaacctctgccggccagaatgtgcgtttcgtgcaggagaagccgggcgcagaatgtcagctgttagggaccgcgacgggtaaacagagcaactggctctccggccagaatggcgatgagggcggttccatgcgcggtgcggcgaacgccttgcgtaaccaggcagcagcaatgggtggcaacgtgatttacggcgtcagcagcccgacacaaaacctgttgtcgagctttgtacctaccgacagcgaaatgaacggccaggtttataagtgcccgaactgatgcgtgacgcctctctctgcgagcgcagagagaggcgtggtcgttagatgaggatcaggcgttaagctccgctttcttctccagatagaaggcgtgcagaggacgcaggcactcttccagactgagcattcttcccggctgggaagggatgacagtactgaagatctggcatggcgccagctccgcgtgcatcgccttgagcttggggcttttctcgataatccgcgtcacaacgttattttccagttctgataaatgcggcgcgctggttttgaccaccgctccggagacaattttcttgccttcgtctgtctcgcagcagtacagcacgcccagataatgggaaaacaggtttagcttccagtcttcctggggatactgctggtaatcgatattgggctgagtggttaagtcgacggtatagcacattaaaaaatccatatttgaacttaaatactgaaccagttcctggtcgccgactgtttttaatgcttgttgaataccgataattaatgcttcgatttgcagatcgtcaatacataaagtactaatttgttcatcctgaaatacaagaattaacgttgactgtgtttcgccaggtttgagcgtaatggacatgattcgccgctcaggggatggttgctgtatttcagccatctcaacctgagggatattggcaacaactgcctcattataggtgataagctcatctttataggcctctccttggttttcaagccgctgaaaaatcacagccattctgctctgcagtatcaggagcagatcggctagcaccggtgcctgaagatagtaaatttcgcaaaagccattttccttcttaacttttagcagcaacgctaaaaatcgctcttcaaaggtaattccggcggtattaaaacctataaacgttccttgcatattcatatcctttattaagcagtagtcaccggcttcgattgtgcgagatcgataacacgatcggcggatgcaatggtcgatggtcgatgcgcgacgataatccgggtaatacttagcgctgaaatagactgattgataaccgactcatttctgaggtcaagatggctggtagcctcatccataaataaaatactcggtttgcgatacagtgcacgggcgatcaggatacgctgcttttgcccacctgaaatacccagcccaagttcgccgacaatggtttcgtatcccatagccatcttcataatttcatcatgaatgttgcaccgtctggcacactccatcacaaaatcaagatcggcgctatcatcgaagccacttatattatcaataagggagccggaaaagagacggtcttcctggagtacgcaggcgataccaagacgatagttattcaaaccaatctttttaatctccagattatccgccagtatttcgccggaatccggcgagagcagtccgcacataacttttaatagtgtggttttccctacgccagatgggccaattaacgcaactgattctccaggagcaacggttatgttcaaatttgtaaagatgggttgtgaaaaaggatcgtattgataactaagatttctcacttcaagttttacgccagtgttttccgtaaaaacacgccgcgatggaagttctttttctggttcactaaatgctatttctgatagacgttcgttgtgcagtgagagcatacgaagctgcatcaccaaatcaatgagattcgatgcacgttgagaaaactgaccccgataggcgttaaatgccataaacataccgagcgtcatctcattatcaattaccataatggcacccaaccacagtaccactacctgatcgattgaggtgataaaggtattaatgccaccaaacatcatatcgaatcgagtttgctttatacctgcattgctggcgtcaacgttaagattcagccaatgctgtgagcgacgttcttttaaattcagtgctttgatcgtagaaatgccataaagtgactccataaagtgggagttagcacgtgcgcctttgacgacctgttcttccgttacgcgacgataaaagctataggtagcaaagcgcataatcgcatagcaaatggtaaagccgatgacgacccagactaaccaaccaccatataaggtcagcatcaccaataaaccgattgtcattatcgagtcgatgatgccggtaacgatactattggtaaatattgagcgaatcgtatccaaagacgagaagcgagactgaatatcacctaaatgccttttctcaaaaaaggataatggcaaacttgtcagatgatcgaataacgtcgttttccattgaatatttgtcagggtatttaacgttaacgacgtccatgcacgtagcatgctaataaacgtgcggaatagggtaaaaaatatcaacccgatacagataacagacagtaagctttggtcgtgagccataatcacatggtcagtgactagctgtgtaccaatcggtaacaggagtccgatagcttctaccactacagagtaagcaaagatcttaatcagtgctgattttaaaccaacaattttatgcattaaatccagcaatcgtaatcgggattttgcttcttcttgctggaagttatgatcgggccaaagttcaagcgctacaccggtaaaattgtttgacatctcattgatgccaatgattcttttacccaacgccggatcgtgaataacaaatgcgtttttccttacctttgtaagaacaacgtagtggttcatcccccagtggatgatgcaggggagtttaagctgctttatttcatcaaggtcaagagctaacgctcggctttttaagccggcatgctctgcagttttgcttagagacattagtgaggagccctgggaggggctaccaaaccgctgacggaaattaaacagatcgatattcaacccataaaaaccacagaccattgccagacaggcaattccacattctgatgattctgactgaagaataacgggcgttttgttaacaagagaaaaatttaactttgcaacaacagttttgaaaagttcgttagtcatggatcggcccagtaatgctttgagttatcttatacacaggggtaaacatccacatatagagcggacgctcttccaggaatacaacagcttgagccttgaggccatttgaaagcgaaagcgttttaccattatattcaaaggttttgttttcaattttcacaatggtcttatagagcgccagttcctgctggtttgtgccgttcgtaacattggtatactcagacatttcttgtcgagatgtgggaacagaagatattgaaagtatttttcccgggaattgaccaaatttatctgatgggaatgcagcataacgaatgttaatttcatccccaggttttacataaggtatactattgttaggtaaccataaaataagataatactctatatcaccggtaggttttatctgtgctagactgctgcctttatcaaccatttggcctttagtgacggtcaatgattcaatacggccttcagtcgttgctttaataataatgttaccgtttgcgtttgattcaaccagttgatttttataatcattaatctggttttcttgtgacgagatttgattgtcaaaatcagctatttttgtaattttatcactattgagctgagtgacctgcgattccagttgcattttctgactcaccagagactggtaagtgctttgttgttgaaaatacaaagagtgttgatagttatattggtctttggtaatcagtccgtcacttaaatacttatcatagctggatagattatcatgcattttctttaatccagcctgggcgttagccaacatgcgattagtttcttttaacgaatcattgattgtttttaactgcttctctaaagaaannnnnnnnnnnnnnnnnnnnnnnnnnngttttgaaatgatatcttcagcatttgcgatcttttcattaatgacctctatttgtaccgcactaacattacccgttgtggtgttccgggaaatgtcgatctcatataacggctggcctttggtcacaatatcgccgacttttacatattgggagataacaaagccttgctgcggggcataaacgttgacagagtgaggtagagtaatgacctctccctgaacgtcgattctctgggtaaaggagcaaaatactgtggtggctatcaggatcgcaagaaaagcaaaagagagtaatgcaacaagccatgctggaagccctgcgagcagcagtgcctttcctttccagtgatgctttttatactcaatcgcttccttgcgatagattttttttaacatagttatcgcttaaattataaaatgaaaaggcccgatacgtcaggccttaattactaatgaatgcttgtcaacaaactgttgagctaatcattggcgcgtaaacttagttgctccagaagttcagggtgccgtcataaatagcatccattacgcccagagcataatccagagtcatatcccagccaacgatacccgctgcaataccaaagcaaacgccaccgagaataaccccggcgatcatccctacaccctggccgattgagccgataccgaagataccgccacttacgccaccccaacgtccggcgtacgctgtaccaaaaatagcgcccagagaggcgcccagtgcgatagcgccaacttcttttgcggcccaggtgacgatatcggtaagagtatcggtcagcgcaccgccagaaatttcttccatttcaaatacagttaattggtgcatgattagtcctttaactaaaattaaaattatatattcattccagaccagaatttggtccgcagaaaagatagtcgttgctgtagtatgaatcaactcaactaaatatgaattgttgatgaaattagaggttaatagtgaatcaaatctaaactatttataggttcataaaacagtaactaattcagcaggtggtggcacgcagctattatcgatgtgctgcagatatattgatttattcttgcattcatatatgacatttttttggttgttgacataaaaataaaaaaaaggtggatatcattatccaccttttgtaggggtatggaggttatacttttactcttcctgtatgacaacttcaagcatagcttttacatgaccggaagagacttcagcgctattgtcactcatgcgataatagtcggcggtgaaggtaaagttttgtgatgcctgtgccttggcgaagctataagtttcggcgtcgtaaaatattataggcttgttgtcaattttgaagataacgccaacgttatttgcggcttcggttccagttatcatgttatcgatgatcccatccccggcagaactggtgccattaacagggttaaaccagtagtaaagcttgttgccaactgaaccttgtgggcaagtcacatccattttgatagttttttgtgatggagttgtacctcctcgagaaatggacattaatgtgtttttttcaattttattcagggtgatttggctaggccctgatactgaaatatcgcaagaggtatctttatatgaaatagtcttgaacttcagggttgctgttaacaaaaggcggtcagctgcccttgggttggtgcttaagttacctgctgagaatttaaataccgggtttgtactggtgccggatgtatcgatgacctgctttgttttaattaaccataccgtcataaatttataatcttcattcgattctaaaataggtacgattgtagattgagcaacagcaggattaatagaaccatttttgctgctcagaagatctgaaaactgaaagccaattccatctatgccggtttcatagactggtttgccccttatacccgtgacgccggtaacttccggtgctgttgattcaacaatatactggtctcccattattttgctgcactcaaatgttttataatgtccggtaccgacttttttagtatagaggactgtacccaccggaattgttgggtctgttgcgattttaggacttatgttaaacattgcttgtccagcggaaccataataatcgcatttggcaattacctcgctacaacagcatagtagggataaaaaaagaagtatttttctcattctttattgttccttggtcaatattagcgacaaaccgtttcgatttgactgatgccagacgctttgccttccctggctggtaaagtaaatgaagcgttacattgctgcgctgcgcttttgccccactggacgttaaggatcccggtctcttgcaggccggacatatagaccatcccggcgtcgctgacgatacttggctgcgatttactatctccggcgagcagaaccattgcgccataaggcacgtcctggccgctggcggttttcagatgcacaaaggcccgctggccgatattgccgtcataattagcacgcacgatagcgccacgcgtcggaacaacgctcttcgtggtttctggcagctccatatcttcaccaagcgtggtgctgtccagcgtgatatcggtacgacgataaggtgtaacgtacgggacgatagcgtaaccgcgatagtcggtggagatggtgttatcgttggtcaacttgacgttatccaggcccggcgctttaaccagcacggcggcgtcagtgatgtcctggccaagtgtaatgccatcggcatgagcgacgatgctgccgttggcgccgtagtcaatacgttggctgttattgtcatagctatagccggcattaaggctgccgcgggcaccgttataggtcccacgcatatcaccgctgtaatattcccggttgctgtacccttgctgcaggctccattccaggctgtcgttatctagcccgacgccaccaatggagaccgactgatcggtagaccctgggttgctgttggttaactgatagctggtataggtacccggcagccagttgctcagtggcagcgttacggtcagagtgatgcgctgatcgtcctgggcgtctttaccggagctatctccgctccaggtgtaacggttatagctgtagcccagatagtagttcacattgcggaagccgccgttgtaccccacgctgatcgacttgttggtgcgcttatcgtcccaataatcttcgattaacccgctaacggacagactacccaaacctttacctaagctttggttaaccgtcaggttggtacggttgcgcagcgaacgcggactatagttgccgtcattagagtagctatccagcacctcggagagggtattaaacccgcgggtagagtagcggtagcccgcgatggtgacgttggtgccggtttcgacgatgtttttcccgtaacgtacgcgccaggactgcccggaggtcttttcatcgtctttcttttttgaccacgcctgggtgacgtctgccgaggcggcgcctagctcgccgaggttatagccgagacccgtcgatagcgcctggtagcgcgaggccgcctgcatgccgccatatactgtcaggctgctggagacgccgtaggtcgcggtagcctgagtaaatggcgtttcatcgactccaccatcgtaaggacgatatttaccggaagtaatctcatactccagttgattttcacgcaccatgaccggcagggtggcgaacggcacaacaaattcttgtttggatccgtcggactcttccacgctgacgtaaaggtcgccgctaccgccgcttgggtacatatcggtgatttcaaatgccccgggcgccacataggtctggtagacctgataaccgttctgtttaatcgttacgcgggcgttggttttagcgataccacgaataatcggcgcatagccgcgcatactttccggcagcatcgacgtatcggtcgccagttgtatcccggtaaacggcacgctgtcgaagatggtcgagagcgatgaactctcgcccattaccaggttactgttgatcgggcgaatgctgcgctgcatatagagataggcggaatcccagtctccggcaccgctattgtttttattccaggtgctgaggttacggatacgccatgggccaacgttgaggccggactgcaggttcaaactgtagtattcatcattggcctgcatgtcgttcgagccgctgaactgataattcaccagtaaagcgttaatgccgtcatcaaactgatccggtggaatatacccttgcgcggtggtggataaggccgcctgcggaatagaaatatttaaacgttgggcggtgaagtcaaaatccgctttggtatccgggatgacagtaaggttagtgcaaccatttttatcctcgaccagttcaggaaacgctttaacgcgtacaccatactccgctaacgtttttagactcaggcaaggagtgagcgcgggctcgcggttatcgacggtagcacgactattggcgacaaacttcatcgtccgggtatccaggtagcgaccgttaaacatgatatcgacccgataatctcctggcgcctgtgcattctgggtttgaaaaatggataagtcaggagtggttgatggatcgctaccattcaatgaactaatgaatgagggatcgaaaaagtcacgtgcttgcgctttattattcaaaccagaaagcaatgcaggaagcattgcgataaagacggtggatagtttgaataatccattattcttatttggcatagacacatccctataatgataaaataaatttcttattacagcgatgaggagtagagcgacccagctccgccataatcattgaccactttccaggtaatgctggaagcattaatattttcttttaacaccacttctttggtcgtcattggggcgaccgagttgacttccggcttcacttctttgccgccaatctggatgctattgaaataatagaaaaagggcgttggatttttgatcgttagctttgtgccagatttgcgccattcaagctttttcgcttcggtattaggggagaggtcgaaaagtgctttagggcgatagaccagacgcatgcggtggcggaccgccagttgaatggtgttgttattcgctttggcgtcatctgccggagggatcgccatcacgttaaaatagtacatggattcccggtcggtcggcgcattaacgtttccgttagaaaaaagacgaaccgtattctgttgtttcccttcaaggcggaacagcggcggagtggccataaaagagggcgctttccctgccggagcttcaacccaggatttaatgagatagggaatatcatctttattttcgatttgggcggtaatttcacgcgcaccttctttatacagatagcgggtagattcaattacaataccggcatgggcaatactgctgaggagtaatgcgcaggatgcggtgagatttattaaggtcctgaacatggcttttctctgaatgcaaaaagggcccgccgtaaagcgggaccctttggggaaaaattaaacggtgtaatcgatagtaaaggttgcaacccctttaaccggaccttcggttactgtggtcgcagcgttggttcttacataaccagtggtgtacttcagctgagtaccgttggctgcagagtagctttcggtcatggtgtcagaaccgtcgaaggctacgcgatgggaatcgctgacgcgctggataccaataccgatacccgctgcaccgttagcagcggtgttgtccagaatggtattgtcgctggaggtggtgccggaaacgagaactttcaggcctgtaaccgggctagagctgccctgtgcacagtctttcacgtcaaaaccgaagtcctgagttttgaacagtttaccagcggcttcagcatttgcttcagtggtggttacagtgatcagctgaacgataccgttgttcagggtaccagtcggggtcacgacgcaagagttagctgcatcagagacttcacccagtacagttacctgagcggtgttggttgccattgcctgagcactcagcactgcagatgcagcgaccattacagctacgattgtctttttcatttaattaatccatatatagatacttagtcctgtgtagaatcgataacagttatcaagggaatggagtatgcattcgcattgatattgaaaataagcgtcagctttcctttatatagtgctgagaccaatcatcctgttgaacgacgctaccatatcgcttgccatagcgaaccatggagaagcgggagtaatttaaaagtctggtgcaaaaaatgcttgtgaattattgatgaagcacccgtgaatttaatgctgccccccatctctgatgagatgtggattccagttgagattaatttaatctgaaaatgtgaccattaagcaagttagctatcgcttgtttttttatctgcggtatcctgtgggctgaacttcaatgtgaaatgtacctgtttccatctgaaacaagaatgttcacataatcgtttggttgaaatcatttgattttattatggataatagggttacgtggggcaaggatatggatgacgcagtattatttnnnnngtgtataattaatcaggagattatatttaatgccaatatgaatgagctgcggccgcttgccggggacggggagtgcatcagcctcaatgcgccaaccgccagatgcttgctgctgcttttgcagaattgcggcaaagtcatttcgcgggatgagttcctggcggctgtatgggaaacacggggggtggtcgtttcgcaaaatacgttctatcaaaatatctctttgctgcgaaaatcgctggtaaaagctgggctatctgaggatatcattatcaccgtccggcaaaaaggctttagcgtcgctccgaatacattggtcattcctctctctgatgaagagtgcgataatatgaatcgggtgacattaacgcattatcagaataataaagttgtcgactttatttctgaagaaaaggaaaagcctgacactcatttaaatcttccactaataganaactcatcaaagcatggcagtgatttgatggcaaataaaccggaagaaggtgaaaaagcatctgagcggttgcatgttacttttaaaatacccgtatggttaatcgcgctaattgtcgtgatgattgtaattaatattattgtgttggtcgtgctaaaccggtagctcgtcacagccaggggttatagcgcggtgcgatagtcatttgctggtcaccttaacacccgtctgtcgaaatcttcctatccgaaggtctgccagaacgtcctggcagaccttcagtttattaacgctgcttcagccctaaatccagcggcgtcttgctgggttccccgccaatctcgcgcgccagcttcggcaccatatagccagagatgagggtcaatagttcgcgcatgatttcacgggcttcatcatcgctgaccatgaagtgcgccgctccctgcacccgatccagcacgtgcaggtagtagggcattaccccggcgtcgaacagcgcattactgaggtcggccagggtttgcgcgttgtcgttcaccccgcgcagcagcacgctctggttgagcaacgtgacgcccgcctgacgcagcatggccatcgccgcgcgaaactcaccgtcaatttcattcgcgtggttgacgtggttaaccaggattacctgcagcgacgaacgctggaggcgactggccagcgtctcggtgatgcgcgccgggatcacaatcggcaggcggctgtgaatacgcaggcgcttaacgtgcggaatagcttccagctgggtcattagccagtcaagctcatgatccttcgccatcagggggtcgccgccggagaagatgatttcatcaagctgcggatgcgccgcgatgtagtccatcgccgtctgccagttgcgcctggtgccctgattttcggcataagggaagtggcggcggaaacaataacggcaattgactgcacaaccgcctttcaccagcagcagggcccggttgcgatatttgtgcaacagaccgggcaccacgctgtgctgttcttccagcggatcggtggagtagccgggggcgacgataaattcttcctcagcggtaagtacctgacgaagcagtggatcgttagggttgcctttctccatgcgggcgataaacgcgcgcgggacgcgcagcgggaacaggcgtctggcctcgcgtccggccagcagtttttcatcagcgtctacatttaaaagacgcagcagttcatcaggactggtcacaacattggcaagttgcgttatccaatcttctctggatggggtatttagggttacaatatgcgccattttgtggcttagctaccagttaaacaatttcagagggccttatggcgacttactatagcaacgattttcgtgctggtcttaaaatcatgttagatggcgaaccttatgcggtagaagccagcgaattcgttaaaccaggtaaaggccaggcgtttgcgcgcgttaagctgcgccgtctgctgaccggtacccgcgttgagaaaaccttcaaatctaccgattccgcagaaggcgcggacgttgtcgatatgaacctgacttacctgtacaacgacggtgagttctggcacttcatgaacaacgaaaccttcgagcagctgtctgctgacgcgaaagcgatcggtgacaacgctaaatggctgctggatcaggctgagtgcatcgtgaccctgtggaacggccagccgatcgcggtcaccccgccgaacttcgttgagctggaaatcattgaaaccgatccaggcctgaaaggcgacaccgcgggtaccggcggtaaaccggcgaccctgtctactggcgcggtggttaaagttccgctgttcgttcagatcggcgaagtgatcaaagtggatactcgctctggcgaatatgtatcccgcgtgaagtaatttcgcgtcatgatgaccggcgtagcctccgtgctgcgccgctcttttcgtacaggcacaacgagcacgatacatgaagcgcagcgttaaactcctggtgttactctttctgagcagcgcgctgttggctggctgcaataccgcccgcggtgtgggtgaagatattcagggcctgggccacgctatctctcacgctgtgagctgaatttccctgccgtttcgttaatggcgcttgcctcccggtatgtcagcctcctccacgcatactccttttctcttaaaaatcgcaaagatcccttcatctttggacggtttgtctatgcttatagggcatgaaaacaaaactgacactaaggatgacattatggtgaaaaaaacgattgcagcgttctttacggttttggtcctctcttcagcactgaccgcttgtaacaccacgcgcggtgtcggtgaggatatttcagacggcggcaacgcaatctctggcgcggcaaccaaagctcagcaataaacgccgtcaacggtacggtttagcgccgtaccgttcttcacttctctcattccgttggatatactcaccacgacttttcatccaccttacgggacgacccgtaagcgtttctcatccggggacggccccagcaaaggagccttatgtcctggatagtcttgtttatcgctggcctgctggaagtggtgtgggccgtcggcctgaaatatacccatggctttagccgcctggttcccagcgttatcaccatcgtggcgatggtggccagcatggcgctgctctcatgggcgatgaaaaccctaccggtaggtaccgcctacgccgtctggaccgggatcggcgccgtgggcgccgccgtgaccggtattgtgctgttaggggaatccgccagcgccatgcgtatcgccagccttgtctgtatcgtgattggcatcattggcctgaagatcagcgcgcactaatcatagcgctgattgacccagaccagtttgccgacatcaaagccctgtcgggtggcaatgtccagcatctgctgcctgacctccggggcgatggtcggcgcccgggccagcagccagagatagtcgcgatcggggccgcagaccagcgcgtaacgatactccttatccagagcaatgacgttatagctgccgtagaaagggccgaagaaggaaatcttcagcgcggcgcggctgggctccccggtaaagtacgctaccccgtccgttttctgccacataccacggtcggggttatagcctttattgaccacgtccaggccaccgtcatcgcgtgggtgccaggcgatcgtgaccttttccagcccgctttcaaaagggtggtcaaagcgggcgatttcataccaggtacccagatagcgctgaacgtcgaagggactgaccacggtgacgcccggcggcggggcgggcgtgctgcaggcgacagacaggaacgagacggcaatcgcggtgattatcggcaggatacgcatggcatgctccttgctggcttttaagctaagtgtagagtccagcagggaaaaggcggcaagatttttctatgaagcgagcccggtagcagaaatgcgaccgggctcttgcaggatcagataaacagtacgccaacgagggtgatgacgctgaggattgccgccaggccgtagaagacccatttaccgttgggcacatggattttcagatcgtgcatggcgtggtgaatacgatgcaacccacaccacagcggcaggacaatcatcagaaagatgaatgcgcggccgataaagctttgggcaaaggccagcacacgctcatagctaaaggcgtcggccggggcgagccccagcggcagcaggatgccgaccagcagcaccatcaccggcgcgacgatcgcgccccacatgccgcctgcgccaaacagcccccagaatacgggttcatcggaacgtttcggattgggattaatcatctcagcctccttaccagaacagggcgacaaacaggatcaccacggtgaccaccgccgtcaccatccagagccctttaatgaccggctctggccccattttttcgcctttgatgatgacgttggcggctttcggcgccagctcaaaccaggttttggtgtgcagcagcgccgccgccagagtaatcaggttgaggatcaccaccaccgggttttgcaggaatccgatatatcccgcccagctctcggcgccgtgcttgagggcaaacagcccataaatcagcacaatgctaaaccataccgtcggtaccgccgtgccttcccgtaccatgtagaagcgataaaacggcagctttttccaccaggtggaggtcattggtcgcacgtagggtttgcgtttcgtcgtcataatgcactccttagcgtggtttcagggtggcgataagaaagtctttcgagctttccaccttgccctgctggatcgcggccgccgggtcgacgtgcttcggacacacttccgagcagtagccaacgaaagtacaggtccagacgccattctggccgttaagctgcgccatgcgttcctttttaccgtggtcgcggctgtcttcgttatagcggtgggcgagggtgatcgccgccgggccgataaattccgggttcaggccgaactgtggacaggcggcatagcacagcccgcagttgatgcagccggaaaactgatggtatttcgccatctgggccggggtctgcttgtttggcccctggtcaggcgtgcggttattgccgatgatatacggcttaatggcttccaggctttcgataaagtgggtcatgtccaccaccagatcgcgctcgatcgggaagttggccaatgcctccaccttgatgcctttggtgtaatcgcgcaggaaggttttgcaggccagcttcggcaccttgttgaccatcatgccgcaggaaccgcagattgccattcggcaggaccagcggtagctcaggtctggcgccaggttgtctttgatgtagcccagcgcgtccagcagcgaggtctgttcatcgtaaggcacgtcatagaacgcgctgtgcggtgcggtgtcgacctccggattgtagcgcaccacttcgactttcaggtttttcatctcagccatgggtggtctccttcttctcagccgcgtccgcttctgcgccatagacacgttttgccggcggcagcgtggtgatcttcacatcgccatattccagacgggtagtgccatcggcctcgcggaaggcgagagtgtgcttgaggaagttgacgtcgtcgcgttcggtacagccttcatccagacgctggtgcgccccgcgcgattctttacgggcgatggccgagtgcgccatacattcggcaacgtttaaaccgtgccccagctcaatggtgtaaagcagatcggtattgaacacgctggaattatcggtaatgcgcacgcgcttaaagcgctcctgcagttcagccagcttgtcgatcgttttctgcatcagctccggcgtgcggtagatgccgcagccttcctccatcgacagccccatttcatcgcgaattttcgcccagttttcgttaccttcctggttgacgagatctttcaggcgctgctccacatcggcagccagcgcatcgagggcggcgccgtttgcctcgcccgcctgagcggcgcgctgcatggcctgctccccggccaggcggccgaagaccaccagctcggccagcgagttggagcccagacggttggcgccatgtaagccaacggacgagcattcgcccacggcaaacagccctttgatccgggtttcgcactgctgatcggtttcaataccgcccatggtgtagtgcgcggtcgggcgcaccgggatcggctctttcaccggatcgacgccgacgtaggctttcgccagttcacagataaacggcagacgctccagcagttttttctcgccgaggtggcggagatcgaggtagaccacgtcgccgcgcggcgtcgggatggtgttccctttccgccactcgtgccagaaggcctgggacactttgtcgcgtgggcctagctccatatatttattcttcggttcgccgagcggggtttccgggcccatgccgtaatcctgcagatagcggtagccgtttttgttgaccagaatcccgccttcgccgcggcagccttcggtcatcaggatcccggagcccggcaggccggtcgggtgatactgaacgaattccatgtcgcgcagcggcacgccatggcccagggccatccccatcccgtcaccggtgacgatgccgccgttggtgttgtagcggtagacgcgcccggcgccgccggtagccagcaccacggcgttagcgcggatctgcaccagggtgccttccatcatattcatcgccaccaggccgcgggcctgcccgtcatcgaccagcaggtcaaggacgaaatgttcgtcaaagcgctgaatttggggaaactgaagggaggtctggaagagggtatgcagcatgtggaagccggttttgtcggcggcaaaccaggtgcgttcgattttcatgccaccgaagcgccggacgttgacgctgccgtcggggcggcggctccatgggcatccccactgctccagctgggtcatttccgtcgggcagtgatgaacaaaatagtcgacgacatcctgctcgcacagccagtcgcctcccgcgacggtgtcgtgaaaatggtactcaaagctatcgtgatcctgggcaacggctgcggatcccccttctgcagcgaccgtatggctgcgcatcggatagactttagaaatcagggcgattttagcgttggggttggcctgagcggcggcgatagcggcacgaaggcctgccccgccggcgccaattacggcgagatcggcttgaaaagtttgcacgacattcctccagttttagtgtatttcgccgccgggctggcgaaaaagtatcactgctcctttataggtacaggagtatagccttagggtcagtatggaaaattgacgtgttcgatttttttatcgatatgtgcggttatttatcagtggtatttatgcgtcagggttaacgatagattaatggcatgtagtctgccggagattgcacaaaatttgtttcactcgccggttgcgagtagacttcgtgcccttaatttgcaatcggagaaagtaccatgagcgagacggcaacctggcagccgagcgcacccattcccaatctgttgaagcgcgcggcggtgatggcggaaatccgccgtttctttaccgatcgcggcgtgctggaggtggagacgccttgcatgagtcaggcgacggtaacggatattcatttgttcccgttcgaaacccgtttcgtcggcccgggccattctcaggggcttaacctgtacctgatgaccagtccggaataccacatgaagcgcctgctggcggcgggttgcggcccggtcttccagctgtgccgcagcttccgcaatgaagagatggggcgtcatcacaatccggaattcaccatgctggagtggtatcgtccatgctatgacatgtatcgcctgatcaatgaggtggacgatctgctgcagcaggtgctggagtgccaaccggcggaaagtctctcctatcagcaggcgtttcagcgccatctggaaattgacccgctctctgccgataaagcacagctgcgtgaagtcgcagcgaagctggatctgagcaatatcgccgatactgaagaagatcgcgataccctgctgcagctgctgttcaccatgggcgtggagccgcacatcggcaaagatcgaccaacgttcatttatcatttcccggcgactcaggcctctttagcgcagatcagcccggaagatcatcgggtcgctgagcgctttgaggtctattacaaaggtattgagctggcgaacggtttccacgagctgaccgacgcccatgaacagcgcctgcggtttgagcaggataaccgcaaacgcgccgcgcgcggccttccgcagcagcccatcgataacaacctgctggcggcgctggaggcgggtctgccggactgctccggcgtggcgctgggcgttgaccgcgtggtcatgctggcgctgggcgctgaaagcatcggcgaagtgattgcctttacggtagaccgcgcctgatcgctttttcacctccctccgccggcgggtgggggaggtgaaagacgactttggacctgacaccctcgccccggctttagcccgaatacccacaatttccatccgtgattttgctactatccgcgctctttttatgaggccaggcgtcgctcgtcgggcgatgcccacgtttggatagatttatgcatcaacaactcaagaagatgagcctgatcgggctgattctgatgatcttcacctcggtgtttggctttgccaacagcccatcggcgttttatctgatgggctatagcgcgatgccgttttaccttttttccgccctctttttctttatcccgttcgcgctgatgatggcggagatgggctcagcttatcgtcgcgaagagggcgggatctattcctggatgaaccacagcgtcgggccgcgctttgccttcattggtacctttatgtggtttgcctcgtacgtagtgtggatggtgagtaccgccgctaagatctgggtcccgctatctacttttttgtttggcgcggacgaaacccagacctgggcgctgggtagcctgacgccgacgcagacggtcggtattctggcggcctgctggatggtcgtggtgacctttattgccgtcaaagggatcaataaaatcgctaaaattaccgccgtcggcggtatcgcggtgatggggcttaacctggtgctgctgctggtgagcggggcgatccttctgcttaacggcggtcatttcgcccagccgttaaacttcaccctttcgcctaatcccgggtatcagtcgggcatggcgatgctgtcgtttgtggtatttgccatctttgcctatggcggaattgaggcggttggcggcttagtggataagaccgataagccggaaaagaactttgccaaaggtattatcatcgcggcgattgttatctcgatcggttactcgctggcgattgtgctgtggggcgtgagcgccaactggcagcaggtgcttggcgcgcgttcgaccaacctcggcaacatcacctatgtgctgatgaccagcctcggggcgacgctgggccaggccctgcacctgacccctgcggcgtcagccctgaccggggtctggttcgcccgtattaccggcctgtcgatgtttctcgcttacaccggcgcgttcttcaccctcagctattctcccctgaaagcgattatccagggcacgccaaaagcgctctggccgtcggtgatgacccgtctcaacgtcaacggaatgcccgccgcggcgatgtggctgcagtgtctgctggtcggggtgtttatcgtactggtatcgttcggtggggatagcgcttccgcgttttataacaagctgacgctgatggccaatgtctctatgaccttgccttatctgttcctgaccatcgccttcccgttcttcaaggcgaaaacccatcttgaccggccgttcgtgatcttcaaaaaccgtccgtcgacgctgctggcgaccggcgtggtgctgctggtggtgaccttcgccaatatcttcaccattatccaacccgtcatcgacagcggggactggaacagcaccctgtggatggtcggtgggccgatcttcttctcactgctggcgctggggatctacgaaagctaccgtcggcgcatggcgtccggcgcgctggtgatggagagttaaagagcctgcccggcggtgccgccgggcaggggatggtttacaggctaccagccgtacggcggctggtttttccagccgaggtcatggttttactgctttgcctgccgtcaatactttccagacgcatctggaacggagggaacggcatttcaatgccatgctcgcggaagcccgccaggatcaactgatgcatctcatggcgcagcggcatgcggtgccccatctccgcggcaaaaatacgtagctcgaaaatctggatcccctgctgcaggtcgacgagaaacgcctccggcgccggggtatcgatgaccagcgagcagcgatgcgccgcggcgatgagaattttcgtcacctcttcggtatcggcgtccacaggcgccggcaccgtcagcaccacgcgggtaaccgagtccgacagcgaccagttgataaactgttcggtaatgaacgccttgttcggcacgataatctctttccggtcccagtcgctgatggtggtcgcacgggtattaatgcgggtgacgctgcccgtcaggtcgcgaatggtgaccgtatcgccgatgcggatcggcttctcaaacaggataatcaggccggagataaagttggcgaagatctcctgcaggccaaacccgagacccacacccagcgcggcgaccagccactgcagcttcgaccactcaataccgatcatcgagaagcccaccagcccgccgaccagcatcagcagatacttagtgatggtggtgatggcgtagccggtgccgggcgttaaatcgagatgctggaggatcgccagttccagcagcgcgggcaggttgcgtaccagctgagtggtgatgatcagcaccagaatggcaatcaacaccgcgccaagcgtaataggctcaaggctttccaccccttgtaccgtcgaggtcacgtcccacagcgagatattctcaaggaagccaaacgccgagtgaatctccgaccacagcacgatgaccgatagcagcgcgatcagcatcagcagggagcgcacaagccgcagcgactgggtactgatggcatcgaggtcgacctcgctgacctccgtctccaccgacccttccgggctgctgacgtgaacgggctcatcttcgccgcgggcgcgctgagcgagaatttccgcgcgacgatggcgggcccggtcgaaggccagccggcggcgctggatcagcatccagcggcggatgatgtgatagaccaccagcagcaggaaccagatggcgaccgaggtttccagacgcgcaagcagcgcctgggcggtggcgaggtagccgacggcggccgccagcatggccaccagcggggcgccaagcatcaggttccacagcaggcggttcaccatattgtcgccattcccctctttatccagatagagcggaataccggcgtgcttaaggctcagggtgaccaccgccagcgcgccgcagatcagcaggaagcacaggcggcccagcgaagcggagaattcgcggtcgttaagattatcgaacatgatcagcgccataatcagcggcacaatcagcccgatgctcatcaggtagtagcgcatcgccttcgccacgcggctacgcggccagccgaagtgggcgataaacagcccgtttggccgggcgaaggtggcgcagatcatcaccacccacagcaaaggcaccgtcgcggtgactccatcgccaatcgccaccgccagcgggaacggccaggcggactgcagaccatagccgagcgtcatccacagcaccggcagcggcgaggccaccagtatcgaccagaagaccgtgcgcagcgtcagccagaagtgatcctgggtgactttccccacccgggcgctggagcgctcgagaaagcgggtgaaatggcgccgcgagctgatgctaaagccaaccagcagcagggcggcaaacagcggtagcagggtctctttgctggtaagcatcatcgcgctggctttgcccagttcgctgatggtatccagggagatcaggcgccgcagatcctggacgatctccagcggccatgagaagccgatggggctgacgtccgaagtccagaacagatagcggtgggtggcttcgttgatctctttcagcgcgtcttccagctggccgttggcgaccttcagcttggtgagctccagcatcagggtgtcgccgccgcgcagcagcgagttcagcagctcgttctgcgtgcgcagctgcgcctgcaggatcttgttctgctcgctggtcagcggttcgccgtcggcctggcggatctgccgcagctgcggctgcttactcagcaaatcttcaaagcgcagacgctgcacgcgcagctgcgccatttccgtatccagctgctgcgggcgagggcgctccggcagccgcgccacctgggcgcgcagggcttcgcccagcagattggaggagcccagccactgcgactgctcgcgcagggtgtttaacgcctggcgcacctgcagcgtttgattcgtcgcctgtcgctgctgggatgccaccagatccatgcgctgcgcctgctggttcagcgcctgggagagctcacggttgaccttaaactgggcggtgatgtccggcggcaggttttcactgttctccgccagcagttcggtactctccagcgccttttccgcctcccgctggcgctggctgttttgcagattgcgcagcgcctgcagataggcatccagctgctcgctctgtttttgcgccagctcggaacgggcgcgcgacagctcctggcggttgttggcggagagctgggcgaggtcgagttcatccaccagcgccttcagacgcgccgattccgcctgcagggcaagattttgcgcctgggcgagagcattgttgccggtttgcgtgccgatgcggcgctcaacctcattgagctgacgacgggcatcggtttgctgctgcggcagctggttcagggagtcggcgatttcacgcgcgcgatcctgctcctgctgcgcctggcggctcgattccagcagctgactgctgacctgcaggatctcctggttcagcgcatcggcggtcaggccggttggcacctggcgcggctcttcgctcagattattgagctgggcacgcaggctttgaaacagtttggggaaattgtcgataacgtcctgatactgacgggcgcgctcgagggatgattttcgctcctcaagcgcgttcagcgcggactgcagaacttcaacggtttcaggctgggcgggctttgccgccttcgcctgttccagttcctgggttatctgtttagcatccggggctgtcgcagcgtacgccccgaaactgaggctcaaggccaacaggaaagtgtatatcaggcgcacggcataacccttttgctgaagaattaaccttggtcttgtttatcgtcaaccagcgggctggcgcggtgttcggcgcggatctcttcttccggtaacggcgcgggttcagcggcggcggtcgcttccactgttgtcgccagcggttggccgatcttggtcacggacaggctttgcagcgtgtcgaccagcttcacctggcccggggcaaacaggttgatcacggtggaacccagtttgaagcggcccatctcctggcctttcagcaaggcgatggagccttcgttgtcgccagcgggccaggtccagcgtttaataatgccttcgcgcggcggggtcacggtgccggaccacacggtctcgatgctgccgacgatagttgcgcccaccagaatttgcgccatcgggccaaactcagtatcaaacaggcagatgacgcgctcgttacgggcgaacaggttcgggacgttctgcgccgtcaagtggttaacagagaacaggtcgccaggaacgtagatcatttcgcgcaggatgccgttgcacggcatgtgtacgcggtgatagtcgcgcggcgacaggtaggtggtggcgaagctgccgttacggaacaggtcggccatctgatagttgccggccagcagggcttccagactgtagtcatgacctttagcctgcaggattttatcgttctcaatggcgccaagctggctgatcacgccatcggccggcatcaccagcacgtttggatcggtattcaacgggcgaacgtcgtcgcgcagcgggcgcacgaagaaatcgttgaaggtgcgataagccgcggtatccggcttctgcgcctctttcatatcgaccttgtagtatttcacgaacagatcgatgaccagcttcgtcagccaacctgcgcgtttgctcgcaccccagcctgcgaggcgggtgagccacagtttaggcagaatgtattgcagtgaaagtttaagatcgtttaacaaagtagcctccaggccatgatatgtcgttcctgaccccgcctgcgggcggggacctgaaaaaaggggacgattctatacgtaaaactcgccaaatggcatccgcgtaagctgcgtcatcatcgctgcccggcagcgcctgacgtgatgctcagcttaatgatcagtcatcggacgaggaaaagtttttacgcgtttttacctgtacctgcgccatgctttccaggatgcggtggtagttctcaaaacggctttcggcgatcttgccgttctctaccgcttcgcgaagcgcacagccaggatcggaatcgtgtttacagtcgcgatatttgcaacggcctaaataatcatggaattcgacaaagccgttggtgatttgttccgcttccagatgccacaggccgaactcacgtacccccggtgaatcaatcacatcgccgccgtgcgggaagtggtagaggcgtgccgcggtggtggtgtgttgacctaagccggaaacgtccgagacatcattggtgaggatctgatcctcgttcaacccgagcagggcgttcagcaggctcgatttaccgaccccggactgcccggcgaagatactgatgcggtcggtcagggccgcttccagcggcttaaggccgtcctgagtccgactggaaaccagcagcacgcggtaaccgatgttgcggtagatatccatttgctcattgacgaagcgcagaccatcatcatccagcagatcgattttattcagcacaatgagcggctcgatatcctgcgcttcgcaggccaccagatagcgatcgataatattcagcgacagctcaggcaggatcgcggaaaccaccacgatctggtcgatattggcggcgataggcttcacgccgtcgtaaaaatccggacgcgtcaggacggaggcgcgatcgtgcaccgcctcgacgatccctttgacgcttacgccgtcggcggcgtctttgcccggccgccagaccacgcggtcgccggtgaccagcgagcggatcgtccggcggatattgcagcgatgcacgctgccgtcagcggattcgacgtcggcatgcataccaaagcgactgatgacaatgccttccgacgtttcgccaaacaggttgtcatcgtagtcggccttctccgcagtggttttcagacggcgctggtggttggctttgacgcggcgctgctggcctttggagagtttatttttactcaatcgaactggctcctggtcgccctgatggggcaaaacctctatgatacacgctattttagatgaatatagtcacgcgagaagggtggaaaatagcatgagtgcaaatgaaaacaacctcatttggatcgatcttgagatgacagggctggatccggagcgcgatcgcattatcgaaatcgccaccctggtgaccgatgccaacctgaacattctggctgagggcccgaccatcgcggtgcatcagtcggacgctcagttggcattaatggacgagtggaatgtgcggacgcataccggcagcggtctggtggatcgcgtaaaggccagcaccgtcagcgagcacgatgccgaactggcgaccattgagtttcttaagcagtgggtgccggcgggcaagtcgccgatctgcggcaacagtatcggccaggatcgtcgcttcctgtttaagtacatgccgcaactggaagcctatttccactatcgctatctggacgttagcacgctgaaagagctggcgcgccgctggaagccggaaattctcgacggctttaaaaagcagggcactcatcaggcgatggacgatatccgcgagtcggtcgccgagctggcttactaccgcgaacacttcattaagctgtaaaccgcgaccgggccctgtgcgcggcccggtacacttttctgcgttatttaaaccacttctgctgcatctgctggaagtcaggtgtcgccatgaccgcggccagggcatcgttgatggcgttcagcagctccggatcgtctttgcgcaccgcaatcgcatactgcttaccgtaataagccgggtcggtggcccgttcatccatgatggcgtagtcagggttctcctgctgccaggcgtcgagggtggcgaagtcgcccatgacgccggttatttgcccggctttcagcgcggccagggcgctggcgacatcgtcgtaagggacagcctgtacggctttctgtttatcacgcaggtagcgctgatgcagcgtgcctttcaccacgccgacttttttagccttcagatcggcaaaggtatgggcgacatctttgttgacgatcactaccccggagagcgcctggcgatagggtcggctgaaggcgacctgcttctcacgcatcgggatcacttccatgccggcaatcaccgcgtcaaatttcttaaagcgtaaagccgggatcagggtatcgaaacgctgcgccgtgaactggcactgcgcctgcatctgctggcacagggcgtgcgcgagatcgatatcgaagccaacgggctgatttttgccgttggcggtgacaaacggtggattggccgtggtggtgccaaaatggagcgtctcggctgacgcggttccgatggccagcgtgctcagcagcaggacggtgaggacttttctcatgctaattccctgtttggcgtcggggtggcctcgttatacgtcgcgccaccgctgtatgatgcgagcgattttgcgtcattcagccgggcggaaaaagcgattttgcccgttatgacgcttatttatacaattcagcggcgtagatggcgagaaaatgtccatttaaacaaaaaacgcaaaaaagtgatcgtcagggggttgcaggggcatcgaattctcgtataatgcgcctcccgtaacgacgcagaaatgcaaattacgacgccatcgaaatatggcaaaaaatgcagtaacgcgggaatagctcagttggtagagcacgaccttgccaaggtcggggtcgcgagttcgagtctcgtttcccgctccaaaatttgaaagcaccatcctgatcaaaggatttcatctcgcagatgcggggcgaaagccgaagattaagcgggaatagctcagttggtagagcacgaccttgccaaggtcggggtcgcgagttcgagtctcgtttcccgctccaaaatttgaaagacacaccacaccagtcgcagttttcaggttgctagacggtagcttgaatgacgatgattaagcgggaatagctcagttggtagagcacgaccttgccaaggtcggggtcgcgagttcgagtctcgtttcccgctccaaattttcttccatctcttatttatccacagtgcaatccagcgccggggatgattttcgtttggtccgcagaaatactgtgaacagagttatccacaggttgtcgttccgtcactggcggcgcaaatgcttcgctttgtaaatagtatctttgtatgttattgaaatttaacaaataaatttcatttcaaaatgttaatccgatcacttgaccttggtctgcgccttgaaacgcaatgtgttttagattttattcacagcctgtgaatgaatcaggcgtcgcgcggcaagcctttctctaccactctgaccagacgtaattttttcggcaactgtacttcaacggcgtcggcgttccgctttttcagttgctgggcaatcgcccactcaatgtgttcgtcgagaagcgggtgctcgccccggcggctctccagggcgcgaagatgggcttcatcccagggcgcattgcccaacgcgacggcgatattgcgcagccagcgcaggtggccaatgcgacgaatcgccgacccttcggtcaccttcagaaaccacgcttcgctccaggcgaacagctccaccagcggcggggcatgcagcgctttgcgtgggctgaaatcctcttcatcggtgagctgtgagaaacggttccacgggcagatcagctgacaatcatcacaaccgtaaatacggttgccgattagtggacggaactcctcggggattgcaccttccagttcaatggtgagataggagatgcagcgccgggcgtcgacggtatagggctcaacgatggccccggtgggacagatggtcatgcaggcgacgcagcgcccacactcctccgcgatcgggctgtcgaccggcaggggcagatcaatcagcagttcgccgaggaaaaagaacgatccggcgtcgcggcttaagataagtgagtgcttacctgtccagcctaggcccgctttttctgcgattggccgttccaggataggcgcggaatcgacaaaaggtctaaaattgagcgaagcacactgttcctgaatcttctcccccagctttttcaggcgattacgtagcagcttatgataatcacgcccgagggcataacggctgacgtaacccagcgtgggatctttcagggtgcgggcaaaggcggcgttagcgggcagatagttcatccgcacgctgatgacgcgtaacgtaccgggcagcagttcgtggggacgggcgcgcatcataccgtgacgggccatccattccatttcgccgtggtattgtttatccagccatgcctgcagtttgggttcactggcgctgaggtcggtatcggcgatccccacctgctggaacccaagctctgtgccccattgtttgatttgttgcgctaactgaacgagatcgaggggctgtgacatgatggaccatacaatgacgaaaaaccctgacagtataccatacaacatttggcctgcggaggcgctgcgcctggccgaacgagaggcggcggacagcctggggctgacgctgttcgaactcatgcagcgcgcgggcgaggcggcgttccagctggccagctgtgcttatcctgccagcgcgcactggctgatcctctgcggacatggcaacaacggcggcgacggatatgtcgttgcgcgtctggcacaggccgcggggcggcgggtgacgctgctggcggtggagagtgacagcccgctgccggaagaggcgcaggcggcgcgggaggcatggcttaacgccggcggcgtgatccatgcggcgactatcccatggcccgacgatatctcactgattattgatggcctgctcggcaccggtctgcgcagtgcgccgcgcgatcccgttgcggcgctcatccaccaggcgaaccaccacccggcgccggtggtggcgctggatatcccttccggcctgaatgcgcagacgggcgcgacgccaggtgcagtggtacaggccgaccatacgctgacctttatcgccctcaagccggggctgctgaccggcaaggcgcgggatgtcgtcgggcaactccaccatcatgcgctggggctcgaacgctggctcgccggacaaagcactcctctgacgcggttttgcgccgcccacctcgccgactggctgccgccgcggcgggccacctcccataaaggcgatcacggcaagctggtgattgtcggcggcgatcgcggcacggcaggcgctatccgtatgtgcggtgaagcggccctacgcagcggcgcgggactggtgcgagtgcttactcacccggagaacgtggcgcccattgtcaccgtgcggccggaattaatggtagatgagctgacgccgcagactctgaaagccgcgctggagtgggctgatgtggtggcgattggccctggcctggggcagcgcgaatggggacgcagcgccctgcgcacggtggaaagttttaacaaaccgatggtctgggacgccgacgcgctgaacctgctggcattcaatcccgataaacgtcacaatcgcgtgctaacgccgcaccccggcgaagcggcccgtctgctgaacgtcagcgtggcagaaattgaaagcgatcgcttactttctgcgcagcgtctggtaaaacggtatggcggcgtggttgtgctgaaaggcgcgggcacggtggtggccagtgaaagcggggcgatgggcattatcgatgccggcaatgccgggatggccagcggcgggatgggcgatgtgctcaccggcatcatcgccgcgttgttaggacagcacctgacgccgtatgatgctgcctgtgccgggtgcgtcgctcatggcgatgccgccgaccgactggccgcccgcgagggcacccgcggcatgctggcgaccgatctcttttccacgctcaggcgtgttgttaacccggatgtgattgacgtagaccatgattaaccgagtgattcctttacccgatgagcaggccacgctggcccttggcgaccgcatcgcgcaggcctgtaccggcgccaccgtgatttatctgtatggtgatttaggcgcggggaaaacgaccttcagccgcggctttttgcaggcgctcggtcaccgcggcaatgtcaaaagcccaacttataccctggtggagccctataccctcgagaacctgatggtgtatcacttcgatctctaccgtctggcggatcctgaggaactcgaatttatggggatccgtgattattttgccgacgatgccatctgcctggtggaatggccgcagcaaggcgcaggtgtcctgcctgacccggatgttgaaattcaccttgattaccaggcacaagggcgtgaggcacgtattaccgcgatctcctcacggggtgaatctttactggcgcgtttagccttttagcctgaaggatgacgggatgaagtatcgcataaccacctggcttgccgctgcgctgatgctgtcgagtcttcacgccactgcggcgagtttatccgatatccaggtctctaacggagaccagcaggcccgtattaccctaagctttgtcggtgagccggagtactcctttaccccacagggtaaacgtctggtggcgctggatatcaagcagaccggcgtattgcagggactaccgctgcagtttagcggcagcaacctggtgaagagtattcgcgccggcacgccgcaggatacgcagacgctgcgtctgctggtggatctgacggaagatggcaaaactcgggcggtgaagcaacagaacggggcgaattacacggtggtctttaccatcaacgccgacgcgccgccgccgccgcctccgccgcccgtggtggtgaaacgggccgacccgccgccggtgatgccttcccggacgacgacgtcagggcgtaacccgttcagctcgtcgggtcatgaacggcagacggtgatgacctcctctcagccggcgatgaccaacaatcagaccgtgactcgcccggcggcccgcacggtgtcggcggatgataaagtcattatcgccattgatgccgggcacggcggccaggatcctggcgcgattggcccgaacggcaccaaagagaaaaacgtgactatcgctatcgcgcgcaagctgcgggcgttactgaacgccgatccgcagtttaagccggtgctgacccgcgacggggattactttatttcggtgatgggccgctctgacgtggcgcgtaagcaaaacgccaatttcctcgtctctatccatgctgacgccgcgccaaaccgcgatgccactggcgcctcggtgtgggtgctctcgaaccgtcgcgccaacagcgaaatggccggttggctcgagcagcatgagaagcagtctgaactgctcggcggtgcgggcgatgtgctggcaaacagccaggccgacccctacctgagccaggcggtgctggatctgcagtttggtcattcccagcgcgtcggctacgatgtggcgaccaacgtgctgagccagctgcagcgtattggcaacctgcacaaacgccgcccggagcatgccagccttggcgtgctgcgctcgccggacatcccgtcgatcctcgtggaaacgggctttatcagtaacaacggcgaagagcggctgctggggagcgatgattaccaggagcagattgcggaggcgatttataacggcttacgcaactactttatgcagcatccgctgcaggcggcgcctcgcggcgaggcggcgcagaccgccagcgccgcggcgccgggcgggatgttgattaactaaggagcaggggatgccgattcaggttctgccgccgcagctcgccaaccagattgccgccggcgaggtggtggagcggcccgcgtcggtggtgaaagagctggttgagaacagtcttgatgcgggcgccacgcggattgacattgatatcgaacgcggcggcgcgaagctcattcgcatccgcgataacggcagcggcatcaaaaaagacgagctggcgctggccctggctcgtcatgcgaccagcaagatcgcctcgcttgacgatctggaggccattattagcctcggctttcgcggcgaagcgctggccagtatcagttcggtagcgcgcttaacgctgacttcgcgcacggcggagcagcaggaagcctggcaggcgtatgctgaaggccgcgatcaggcggtgacggtgaagccggcggcgcacccggtcggtaccactctggaagtcctcgatctgttctataacaccccggcgcggcgcaaattcatgcgcaccgaaaagaccgagttcggccacattgacgaggtggtgcgccgcattgcgctggcgcgcttcgacgtcactatcaacctcagccataacggcaaggtgatgcgccagtatcgggccgtcgctcaggatggccagcgcgagcgccggctggggacaatttgcggcgccgcttttctcgaacatgcgctggcgatcgagtggcagcatggcgatctgaccctgcgcggctgggtcgccgatccgctgcataccaccccggcgctggcggaaattcagtattgctacgttaacgggcggatgatgcgcgatcggctgatcaaccatgctatccgccaggcctgtgaagacaagctaggggccgatcagcaaccggcgtttgtgctgtatctggagatcgatccccatcaggtggatgtaaacgtccacccggccaagcatgaggtgcgtttccatcagtcgcgcctggtgcacgactttatctaccagggcgtactgagcgtactgcagcagcagcttgacgcgccgctggcggaaaaagacgacccgccggcgccgcgcccgatgccggagaaccgcatcgccgcgggaggcaaccagtttgcgcggccagcggaagcgcgggagcctgcgacccgcttcagcatcacgccatcgcgtgagcctgcggcctccagcggcaaaccgggcggcgcgagctggccgcatgcgcagccgggttaccagaagcagcagggagcgctttatcgtcaactgctcgacacgccaacggcgccaaagccagcgttgcagcctccggcggcggcagagttggccggtcacagtcagagctttggcagagtgttgacgattgttggcggcgactgcgcgctgctggagcgcgagggcggtctggcgctgctgtcgttgaccgttgccgagcgctggctgcgccaggcgcagttgaccccgggagcggaggcggtatgtgctcagccgctgctgatcccgctgcggttaaaagttacggaaggggaaaagcaggcgctggccgccgctcagccggcgctggcgcagctagggatcgatgtgcataccgatgccctgcacgtgacggtgcgcgcggtccctttacccttaagacaacaaaatttacaaatcttgattcctgaactgataggctacctggcgcagcaaaacgcattcgacgtcggcaatatcgcccaatggatggcgcgtaatctgacgagcgaacagacgtcatggaatatggcgcaggcgattgcgctgctggcggacgttgagcgtctttgcccgcagctggtgagaacgccgccgggtggcctgttacaacctgtagatctccattcggcgatgaatgccctgaaagatgaatgatgtaaccgaggcgagcctgcccaaggcaatttttttaatgggcccgacggcctccggcaaaaccgcgctggcgatagccttacgtaaagttttgccagtagagttgattagcgttgattccgccctcatttatcggggaatggatattggcaccgccaaaccggatgctgcggagcttagcgctgcgccgcatcggctgctggatattttggatcctgcggaggcctattccgcggcggattttcgccgcgatgcgctggcggcgatggcggatatagtcgccgccgggcgaattccgctgttagtcggcggaacgatgttgtatttcaaagcgttgctggaaggattgtcgcccttaccgtcggctgacccagaggtcagagcgcggattgagcagcaggccgcagagcaggggtggaatgcgttacatcagcaattacaggagatcgatcccgtggctgctgcgcgtattcatccaaatgatccgcaaaggctttcccgggcactggaagtttttttcatttcgggtaaaactttaacggaactgacgcaaacgtcaggagacgctctgccatatcaggtgcatcagttcgccatcgccccggcgagccgtgaactgctccatcaacgcatagaacagcgttttcatcagatgttagcttcaggttttgaagcagaagtacgggcgctttttgcccgcggagatttgcatacggacatgccttccatccgttgtgtcggataccgccagatgtggtcatatctcaatggcgagatcccgtatgatgagatggtttatcgaggtgtttgcgccacgagacagttagccaaacgtcaggtcacctggctgcgcggttgggaaggtgtgcactggttagacagtgaacaacctgaacaagcgctcaacaaagtattacaggttgttggtgcgagccagaactgaacgtgtacaattaaacggtatcgtgcgtaattttttttgagaatcgtaaggttctgagtacaaaacaagcatacatataaggaaaagagagaatggctaaggggcaatctttacaagatccgttcctgaacgctttgcgtcgggaacgcgttccggtttctatttatttggtgaatggtatcaagctgcaagggcaaattgagtctttcgatcagttcgtgatcctgttgaagaacacggtcagccagatggtctataagcacgcaatttctactgttgtcccgtctcgcccggtgtctcaccacagcaacaatgctggcggcggttccagtaactatcaccacggtggtagcgcgcagggttcttctgcgccgcaacaagacagcgacgacgccgaataaggccagtgctgtttttccacgccggggagccaggttttctgcgttccccgctggtattttataaggggtttacgcttgtttgaccgttatgacgccggtgagcaggcggtactggtacacatctatttttcgcaagacaaagatatggaagatctccaggagtttgaaactctggcctcttccgccggtgtcgaagcaatgcaggtgattaccggtagccgtaaagcaccgcacccgaagtattttgttggtgaaggtaaggcagtcgaaattgcggaagccgttaaagcgaccggcgcttcggtcgtgctcttcgatcatgccctgagtccggcgcaagaacgtaacctggaacgcctgtgcgaatgccgggttatcgatcgcaccggtcttattttagatattttcgcccagcgcgcgcgcacccatgaagggaaattgcaggtcgagctggcgcagctgcgccatatggcgactcgccttgtccgcggttggacccaccttgaaagacagaagggcgggattggtttgcgtggcccgggtgaaacccagctcgaaaccgaccgccgtttattgcgtaaccgtatcatgcagatcctgtcgcggctggaaaaagtcgagaaacagcgcgagcaggggcggcggtcgcgtgcgaaagccgatattcctaccgtgtcgctggtgggctataccaacgccggaaaatcaacgctctttaaccagatcactgccgccgaggtctatgccgcgaaccagctgttcgccaccctggacccgacgctgcgccgcattgacgtccctgacgtcggcgaaacggtgctggccgataccgtcggctttattcgccacctgccgcacgatctggtagccgcgtttaaagcgacgttgcaggagacgcgtcaggcgacgctgctgctgcatgtgattgacgcggcggatgtccgcgtgcaggaaaacattgatgcggtaaatacggttctcgctgaaattgaggccgatgagatcccggcgctgctggtgatgaacaaaatcgacatgcttgacgattttgaaccgcgcatcgatcgcgacgatgaaaataaaccgattcgggtctggctttcagcccagaccggggttggcgtaccactgctttttcaggcattaacggagcgtctttccggtgaagtggcccagcatacgctgcgcttaccgccgaaagaagggcgactgagaagccgtttctatcagcttcaggcgatagaaaaagagtggatggaggatgacggcagcgtgagtctgcaggtgcgcatgccgatcgttgactggcggcgcctctgtaagcaagagccaacgcttgttgactatgtggtttaaccttgcagcttgcctgaagatattgacccctgtggggatatcaaaaacaaatatggagcatatacatggcgtggaatcagcccggtaataacggacaggaccgcgacccgtgggggagcagcaaacctggcggcaactctgagggaaatggcaataaaggcggtcgcgagcaggggccgccggatctggatgatatcttccgcaagttaagtaaaaaacttggcgggctcggcggcggcaagggcggactgggcggcggcaatagcgcgcaggggcctcgcggaccgatgggcgggcgtattgtcggcatcgttgccgcggcggcagtgattatctgggcggccagcggtttctataccattaaagaggccgagcgcggcgtggttacccgttttggtaagttcagccatctggttgagcctggcctgaactggaaaccgacctttatcgataacgttcaggcggtgaacgtggagtcggtgcgcgaacttgcggcttccggcgtcatgctgacctctgacgaaaacgtggtgcgcgttgagatgaacgtgcagtaccgcgtcaccgatccggagcgctatctgtttagcgtgaccagcgcggacgacagtctgcgtcaggccaccgacagcgcgctgcgcggcgtgatcggcaaatacaccatggatcgcattctgaccgaaggtcgtaccgtgatccgtagcgatacccagcgtgagctggaagagacgattcgcccgtacaacatgggtatcactctgctggacgtcaacttccagacggcgcgtccgccggaagaggtgaaggccgcgtttgacgatgccattgccgcgcgtgagaacgagcagcagtacattcgtgaagcggaagcgtataccaatgaagtccagccgcgggcgaatggtcaggcgcagcgtatcctcgaagaggcacgcgcctataagacccagaccgttctggaagcccagggtgaagtggctcgctttgcgaagatcctgccggaatacaaagccgcgccggaaattacccgcgagcgtctgtatatcgaaaccatggaaaaagtgctgagccacacccgtaaagtgctggtcaatgacagcaaaaacggcaatctgatggttctgccgctggatcagatgctgaaaggcgccgctgcgccggcagcaaagagcgatagtagtgacgccagcgatctgctgcgcctgccgccagcatccagctcaagcagcgccagcacctcatcaacctcgagctcaaccgggggtagcattatggaccaacgccgcgctaacgcgcagcgtaacgactaccagcgtcagggggaataacgatgcgtaaatctgttatcgcgatcattgtcatcgtgctggtagtgctctacatgtctgtctttgtcgtaaaggaaggcgagcgcggtatcacgctgcgtttcggtaaagttctgcgcgacgacgaaaacaagccgctggtgtatgcgccaggcctgcacttcaagatcccgtttatcgaatcggtgaagatgctggatgcgcgtattcagaccatggacaaccaggctgaccgtttcgttactaaagagaagaaagacctgatcgtcgactcctatatcaagtggcgcatcagcgacttcagccgttactacctggcaaccggcggcggcgacgtctcccaggccgaggtactgctgaagcgtaaattctctgaccgtctgcgttctgaaattggtcgtctggatgtgaaagatatcgtcaccgactcccgtggtcgcctgaccctggaagtgcgtgatgcgctgaactcgggttcggccggtacggaagatgaggttagcaccccggcggctgacgacgcgattgctaaagcggcagagcgtgtagaagccgaaaccaacggtaaagtgcaggtgatcaacccgaacagtatggcggcgctgggtatcgaagttgtcgacgtacgtatcaaacagatcaacctgccggcagaagtgtcggaagcgatttataaccgtatgcgcgcggagcgtgaagcggttgctcgtcgccatcgttcacagggtcaggaagaggcggaaaaactgcgcgcgactgcggactatgaagtcaccaagacgctggcggaagccgagcgccagggccgtatcctgcgtggtgaaggtgatgcggaatcagcgaaactgtttgccgacgcgttcagccaggatccaggcttctactcctttatccgtagcctgcgtgcctatgagaagagcttccagagcaatcaggatgtgatggtcctgagtccggacagcgatttcttccgctatatgcgttcaccggattcggcgcgtaaataagccggagaaggtgtaaacctgaagtaataatgcgaaaaggcgcctgaaacaggcgccttttttcatgctgcgagggcgggaattagttgccgagtagcttgttcagcaggccgccgatcaccggcaggcctgccagcgcactttcgatggtgccgccgatagaagagccgatgctttcgcctaaggttttgcccaggtccggcgccaggtcggccagattgagggtgccaagcagtggcaggttaatgctcagggcatcagtgcccatcgtccatgcggctgcgccgaccttgctgcctaaggccgccagaccatcctgtaaccagcctgcgccgctcacattttcgatttcaaatgcggttaattctctcatcataatcttcctgattaagtagacgtaccgggttgtagtacgcgatggcatagttacaatttaaaaaatatccagcaatacaattagttgtgaattttgtttcacctttccggttcataatgaagctgaaatacgggacaatgtgaaatgagggaatgaattcaccatgctggccgatgacgcccgcgagggcggcaatgatacttttcaattagggttgacgatgaactccaccatttggctggcgctggcgctggttttagtacttgaagggcttggcccgctgctttatccgcgcgcctggcgcaaaatggtcgccagcctgagccagctaccggataatttattgcgtcgttttggcggcggacttgtggttgccgggattgtgatctactacatgttgaggaaatcgattggctgatcaaaaagtggtcggatttgccttattttggatgcaaaaagtgctgtaactctgaaaaagcgatggtagaatccatttttaagcaaacggtgattttgaaaaatgggtaacaacgtcgtcgtactgggcacccaatggggtgacgaaggtaaagggaagatcgtcgatctcctgactgaacgggctaaatatgttgtgcgctaccagggtggtcacaacgccggccatactctcgtaatcaacggtgaaaaaaccgttctccatcttattccatcaggcattctgcgtgaaaacgtcaccagcatcatcggtaacggcgtcgtgctgtctccggccgcgctgatgaaagagatgaagggcctggaagaccgtggtatcccggttcgcgagcgtctgctgctctctgaagcctgcccgcttatccttgactatcacgtggcgctggacgtggcgcgtgaaaaagcgcgtggcgcgaaagcgatcggcactaccggtcgcggcattggcccggcttacgaagataaagtcgctcgtcgcggtctgcgcgttggcgatctgttcgataaagcaaccttcgccgataaactgaaagaagtgatggaatatcacaacttccagctggtgaacttctacaaagcagaagcggttgactaccagaaagtgctggacgatgtgatggcgattgccgacatcctgaccagcatggtggtggacgtatccgacctgctggatcaggcgcgtcagcgcggcgacttcgtgatgttcgaaggcgcgcagggtacgctgctggatatcgaccacggtacctacccgtacgttacgtcctctaacaccaccgcaggtggcgtggcgaccggctccggcctgggcccgcgttatgtggattacgtactgggcatcattaaagcttactcgactcgcgtcggtgcaggtccgttcccgaccgagctgtttgatgaaactggcgagttcctctgcaagcagggtaacgaattcggcgccaccaccggccgtcgtcgtcgtaccggctggctggacgcggtcgcagtccgtcgcgcggtgcagattaactccctgtccggcttctgcctgactaaactggacgtcctcgacggcctgaaagaagtgaaaatctgcgttggctaccgtatgccggatggccgtgaagtgaccaccactccgctggctgccgataactgggaaggtatcgagcctatctacgaaaccatgccgggctggtccgaaaccaccttcggcgtgaaagagcgcagcggcctgccgcaggcagccctgaactacatccagcgtattgaagagctgaccggcgtgccggtggatatcatctctaccggtccagaccgtaccgagactatgattctgcgcgatccgttcgacgcgtaatcactctcaaggggcgccgttcgggcgcccttgtttttgctgttcgcccgccccatttcaaataaattagcggcctgagcgctggctggtttatcatcaataataatgatgtcgctcgacataccctgttttcttttccctgaggtttatgtgcagttaacgagtttcaccgattacggactacgcgcgctgatttatatggcgtcgctgccggaaggacgaatgaccagtatctcggaagtgaccgaggtctatggcgtctcccgtaatcatatggttaaaataatcaatcagttaagtcgcatgggctacgtgactgccgtgcgggggaagaacgggggcattcgcctcggcaaaccagcaggacagatccgcgtcggtgacgtggtgcgtgaccttgaacccttatcgctggtcaactgcagcagcgagttttgccacattacaccagcctgtcgtctgaaacaggcactagctgaagccgcgcagagttttctcaaggaactggataactatacgctggctgatttggttgagaagaatcaaccgctttacaaattattgctggtggagtgacgccactctgccggagatgacaacggaggaaccgatatgtcacaagatccattccaggaacgcgaagctgagaagtacgcgaaccctatcccgagccgggaatttatcctcgaacatttaactaaacgggaaaagcctgccagccgcgatgagctggccatcgagttaaatatcgagggcgaagagcaaaccgaagcgctgcgccgccgcctgcgcgcgatggagcgcgacggtcagctggtcttcacccgccgccagtgctatgccctgccggaacgcctcgatctcctcaaaggaaccgttattggccaccgcgatggctatggtttcctgcgcgttgaagggcgcaaagacgatctgtacctgtcgtcagagcagatgaaaacctgtattcacggcgaccaggtgctggctcagccgctgggcgcggaccgtaagggccgccgcgaagcgcgcatcgtccgcgtcctcgtgccgaaaaccagccagatagttggccgttacttcaccgacgctggcgtcggctttgtcgtcccggacgacagccgcctgagcttcgatatcctgatcccgccggaagagataatgggcgcgcggatgggctacgtggtcgtggtcgagctgacccagcgaccaacccgccgcaccaaagcggtgggtaaaatcgtcgaagtgctgggcgacaacatgggcaccggcatggccgtcgatatggcgctgcgtacccatgaaattccttatgtctggccgccggcggtggaaaaacaggtttccggtctcaaagaacaggtgccggaagagtcgaaggtcggacgcgtcgatttacgctcgctgccgctggttaccattgacggcgaagatgcccgcgacttcgatgacgcggtgtactgcgagaagaaacgcggcggcggctggcgcctgtgggtcgccattgccgacgtcagctactacgtgcgcccggggacgccgctggatgcggaagcgcgcagtcgtggcacctcggtctacttcccgtcgcaggtagtgccgatgctgccggaagtgctgtctaacggtctatgctcgctgaacccgcaggtcgatcgcctgtgtatggtgtgcgagatgacgatttcgtcaaaaggccgtctgaccggttataaattctatgaagcggtgatgagttcacatgctcgcctgacctacaccaaagtgtggcatatgctgcagggtgaccaggaactgcgcgaacactacgcgccgctggtgaagcacattgaagagctgcataacctctacaaagtgctggagagcgcccgcgaagagcgcggtggtatctcatttgaaagtgaagaagctaaattcatcttcaatgccgaacgccgtattgagcgtatcgaacagactcagcgtaacgatgcgcataagctgattgaagagtgcatgatcctggcgaacatctccgccgcgcgcttcgttgagaaggcgcaggagccggcgctgttccgtatccatgataagccaaccaccgaagcgattacctccttccgtaccgtgctggctgagctgggactggagctgcctggcggcaacaagccggagccgcgtgattacgcagagctgctaacctccatcgccgatcgcccggatgcggaaatgctgcagacgatgctcctgcgctccatgaagcaggcggtctacgatccggaaaaccgcggtcactttggcctggcgctgcagtcatacgcccacttcacctcgccgattcgtcgttacccggacctgtcgctgcaccgcgctatcaagtatctgctggccaaagagcagggacataaaggcaacagcaccgagaccggcggctggcactacagcatggaagagatgctccagctgggtcagcactgttcgatgaccgagcgccgcgccgacgaagcgacgcgcgaagtgtctgactggctgaagtgcgacttcatgcaggatcaggtgggcaacatcttctccggcgtgatcgccagcgtgaccggctttggcttcttcgtccgcctgaacgatctgtttatcgacggtctggtacatgtttccagcctggataacgactattatcgtttcgatcaggtggggcagcgtctcattggtgagtccggcggccagacctatcgcctgggcgaccgcgtggaagtccgtgtggaagcggtcaacatggacgagcggaaaatcgactttaccctgatctccagcgagcgtgcgccgcgtaatgtcggcaagaccgcccgtgagaaagcgaaaaagagtacctctggcaagccgggcggccgtcgccgccaggtgggtaagcaggtaaacttcgagccggacagcgctttccgtaaagagaaagagaccgcccgaccgaagaaagagaaaaaagcgaaaaaaccgtcggcgaaaacacagaaaatcgccgccgcgacgaaagccaagcgcgcggcaaagaagaagatcgccgagtgattgacctcccttcaccctgaagtctgctgacgcaggatggggtgaagggggcagataacagaacctaaaacgagtacatcaatgagtgaaatgatttacggcatccatgcggtgcaggcactgctggagcgcgcacctgagcgttttcaggaagtttatattctgaaaggccgtgaggataagcgcttgctgccgctgatccatgccctggaagcgcagggcgtggtgattcagctggccaaccgtcagtttcttgatgagaagagcgaaggcgctgtgcaccaggggatcattgcccgcgtgaagccggggcgtcagtatcaggagaacgatctgccggatctgctggcgcagctcgatcaaccgttcctgctgatcctcgacggcgtaaccgatccgcacaacctcggcgcctgcctgcgtagcgccgacgccgccggcgtgcatgcggtgatcgtgccaaaagatcgttccgctcagttgaatgcgacggcgaagaaagtggcctgcggcgcggcggagaacgtcccgctgatccgcgtcaccaacctggcgcgcaccatgcgtctgctgcaggaagagaacgtctggatcgtcggaactgcaggggaagccgaccatacgctgttccagagcaaaatgaccggcccgatggcgctggtgatgggcgcggaaggcgaaggcatgcgtcgtctgacccgcgaacactgtgatgaattgatcagcatcccgatggcgggcagcgtctcctcgctgaacgtctcggtggctaccggcatctgtctgtttgaagcagtacgtcagcgcagctaaggtattttttcagaaaaagccatcttaaataagatggctttttttttacgtctattgctaaaatatacaacgaagttgatatagattgtatttattatttaatacttaatatatggaataatatatgggatggattcctcaagcgctcgcgagtgcgctccagcaggcggctgagttaaatgtaaaaattgattataacgatcattcatttatcattataatgaatgattacggcgatctacgacttaatgtgttattcacctcccgacaaataattatcgaaactattatctgtccgctgngcgctattcaacggcaggacttgtttaacgccttcattttacgccatcaaaaattactccctctctcctcggtcgcgatatcccgccttaagaatgatgaatattatgtcgcgtttggtgccctgtcgctcaattcctcgctggaagatgtggtgctggagatcgcgacgctggccgctaatgcattagatcttgctgagttgatagaacaatatacgaacaaataacaaggaatgctattgatgggaatattaaagagcctgtttacgctgggtaaatccatggtctcgcaggccggagagacaattgaggaagcgcagggcgtcaggatcctcgaacaacatattcgcgatgcaaaaagcgcactggataaagcaggccaatcgcgtgtcgacctgctcgcacgggtaaaactaagcaacgataaactgcaagatctgcgtgcgcgtaaagacacgctggaagcacgtgccctggaggcgctgaataaaaatgtcgctgcggatttgattaacgaagtcgctacagagattgcccgcctggaaaacgagattgctgtagaagagcgagtgctcgctaaccttgaattttcgcgcgatggcgttgagcaggccgttcatgcgacagctcaacgtatcgcccagtttgaacagcaactggaagtcgttaaggcgacggaagccatgcagcgggcgcagcaggcggtcacaacatccaccctcggggcgtcttctcgggtctccaccgcggcggaatcactccggcgtttgcaaactcgccaggcggaacgccaggccaggctggatgctgctgcgcaactagaaaaggtggcggatggaagcgaccttgttgagaagctcgcgcaagccggcattggtacaaccgacaaaagctcggctgaggatgtactggcacgtcttcgtcaacaacagagcaaatgattgcggccccacggtcagttctgtcctgatgggcgagtctttgaggagtggtcatggcccatttttttcagcgtctttttgctaaaaagagtacgccgactcccgtacgcggtccgctggggttacatcttaaagcgggttttacgctggataccctggcgtttcgtctgctggaggataaccttctgattgagctgccgggcgaggcatataccattgccgcgaccggtcaaattgatttggggggcggcagccggatttatcgttactacaccagcggcgatgagtttctgcaaattaatactactggtggggcggatgtcgatgatatcgatgatattaagctctttgtctatgtccaaagcgatggtatcagccaggaaaaatactggcgttcggcaatcagcccagcgagtattggtaccccgacatttagctggcgccagcagcgttggcagcgtttttttaacggcggcgagccagggaacattgcgccagtttatatgctggagaaagtcgaaaatcagcagcatgccgtatgggaggttcataattttacgatgggctatcagcggcaggtagcagaagaaatgtgggagtacctgctgctaaacggagaagagtcgtttaatgaccggggagaatctgaatggctcttctcgtacgcgttgggagtggatattccactcacctcactggatattattgggtaatttcacggaagaaaaatatgcacgttctgaactcattactggctttttgtacctatttttttatcggtgcagcgatggtgatcttgtttctttttatctattcaaaaatcaccccgcataatgaatggcagctgataaaaaataacaatacgtcggcctcgctggcgtttagcggaacgctgttgggatatgctattccattatccagcgcggcgataaacgccgtcagtattgctgattatttagcctggggtgtcattgccctggtagtacagctgattatctatggtggtgtacggctatatatgccggcgctaagcgaaaaaattattaatcacaatattgccgcaggcttatttatgggctctgctgcgctggccggcgggatttttaacgccgcctgcatgacatggtaatggacgatcatggctaaaaaacgtaaatccagatcccgtaatacggcgcaaaataaagcccaggccactcacgcttccctcgcgcgggttaatcgcccggcgagcgcggtgcaggcaaaacgaaaccgctacagcggcaaatacctgaccctggctattatgggcggcgcggcgttctttgcgcttaaggcctgtagcgatgatacgaatgcggataatggcggtgacggcgtgttttactcctccgtcaatgattgtatcgatgggggtaacagcgccagcgtctgcactcacggctggaacaatgcgaagtcggaattttttgcccatgtgcctaagcaaatgagccaggaaagctgcgaggcacagtatgtcgactgctattttgacagcatcgatcggagctggacgccgatgatgagcggttttttactcagccgggcggtgcgtaaaggtcgcgatgaagaatatacctattacaatggcggctcgtcctattcttccagggctgtctggcgaacatcgtcgggcgcgtatgcctggcgcagtggtaaaaacgatattgccaccagccatacgctgactgcgaaaaaaacggcgactgtttctcgcggcggctacggacgatcgtccagcgcgcgcggccattggggaggttgaacgatgctgcgacacactattcctgtacgcagggatctggatcggattgcggacgaacacggtttcgattttcatgtaattgacaacgagatttactgggacgagagtcgagcctaccgctttacattacgccagatagaagagcagattgaaaaaccgaccgccgaattgcatcaaatgtgcctggaggtcgttgatcgagcggtgaaggacgaacagctgttgcagcagctggcgatcccaccgctatactgggatgcgattgctgaaagctggcgccagggggatccttctctctatggccgtatggattttgtatggtgcggtgccgacgctccgcttaagttgctggaatataatgcggatacgccaacgtcactttacgaagctgcctggtttcaatggttttggctggaagacgccagacgcagcggggtgatcccgcgtgacgccgaccagtacaatgcgattcaggaacggctgattgcccgctttagtgaactttacagcccggaaccgctctacttttgctgctgtgaagggagtgatgaagatcgcacgacggtgctttatctccaggactgtgcgcaacaggccggtcaggaaactcgttttctctatgttgaagagctgggactcggcgtcggcggtatgctgaccgatttggatgacaacgttatccgtcgggcgtttaagctttatcccctggagtggatgatgcgagatgataatggcccgctgctgtgtaagcggcgagagcggtggatcgaaccgttatggaagagtgtactcagcaacaaagggttgatgccgctgctatggcggttctttccccgtcatcctaatctgctacccgcctggtttgccaatgaatcgccacagatcgcgccgggcgagagctatgtgcgtaaaccgatcttttcacgtgaaggcggcaacgtcaccatctttaatggtcagcagcagattatcgaacatgctgatggagactacgcagaagagcccatgatctttcaggccttccagcccttgccgcgctttggtgacagctacacgctgattggcagctggatcgtggatgatgaggcttgcgggttggggatccgggaagataataccttgatcactaaagatacttctcgttttattcctcactatataaccggctaaggctgcttttgtgatctctctccatcgccagtggccgggtcctggccatacttatggctatcgccattgatggagggagacacgatgcactggcaaacgcacaccgtttttaatcaacccaccccgctgaataacagcaatctgtttctgtccgataccgctctgcgtgaagcagtggtccgcgaaggcgccggctgggatggcgatctgctcgccagcattggccagcagctggggacagccgaatcgctggagctgggacgcctggccaacagcaatccgccggagctgctgcgctatgacgccaccggcgcccggctggacgacgtgcgcttccatcccgcctggcacctgctgatgcaggggctgtgcgcgaaccgggtacataatctcgcctggcaggaggatgcccgcgaaggcgcgtttgtcgcccgcgccgcccgctttctgctccatgcccaggtggaggccgggacgttgtgcccgattaccatgaccttcgccgcgacgcccctgctgcagcacgccctgcccgcgccctttcgcgactggctgtcgccgctgctgagcgaccgttacgatccgcaccttgcgcctggcggccagaagcgcggcctgctgatcggcatggggatgaccgagaagcaaggggggtctgatgtgctgagcaataccactcgcgcggagaaaacggcggaagggttttaccgactggtgggacacaagtggttcttctcagtgccgcagagcgatgctcacctggtgctggctcaggctccggcggggctctcatgcttctttgtgccgcgtctgctgcccgacgggcagcgtaacggcgtgcgtcttgaacgcttaaaagagaagctcggcaaccgctccaacgccagtagcgaagtggagttttatgaggcctgcggctggctggtgggcgacgaaggcgacggcgtgcggcagatcctcaggatgggcggcctgacccgctttgactgcgcgctgggcagccatgccctgatgcgtcgcgccttctcggtggcgctgtatcacgcgctacagcgtcaggcgtttggcaaaaacctggtcgaacagccgatgatgcgccagctgctggggcaaatggcgctccgtctggaggggcagaccgcgtttctgtttcgcctggcgcgggcctgggaccatcgggatgatgcccgggaaagcgcctgggcgcgcctgtttacgcctgcggccaagtttgccatctgtaaggccggtatcccgtttgtcgccgaggcgatggaagtgctgggcggcatcggctattgcgaggagagcgaactcccgcgcctctaccgtgagatgccggtcaacagcatctgggaaggctccggcaatattatgtgcctcgatgtgatgcgggtgctgagcaagcagccggcggcgatggagctgctggccgcggagtgtgcggaggtgaaaggacagaaccgccatctcgaccgcgcatggcgtcagctgcagcaactgctgaaacgacccgccgaagagcaggggagagagattgcccggctggtctatcgtcttggcgcgggggcgcagatgctgcgccatgcttcgccgccgctggccgaagcctggtgccggatgatgctcgacacccgcggcggcatacgtcttgacgcgccgaccctcgacgacctgctgctgcgggctatggggcgcgggcgccaggcgcctcaggcgtagagaatggcctgcacgcgccagctgtccggctgttgttcctcgtacatctgaataatgcgataccaggaggcgccttgctcgtctgctttgcgggcaatggcgtgctctacatcctgttggctaccggaaagattagtgacggagatcagaccgatttcattcaggccagtgacgcaatccgcgctggcgaattcggctgactgcgcggacgtattggccgtcgcagcggttaacagcaggctggatagggtaaaagatcgtttcatcgtcagctccatttcacgtagtcccaagggcagtccgttgctaacgtcctgccaggtggttggccgaacgttattatgcacaggagaacgtgaatggacgcaaagctgtgtaaagcagatttaaagacgccgcctcgttatcgacgatagaggatcgcctgcgaataccactggccgggtaccatggtgtcatcgatcatgatgatgacgtagtaatcggctttggccgcttctgctttggccttcagcgccgcttcgacatccatcggcgaaccgtacatcagtacgctcaccgtggccattttatgcaggccagccgtctggtagcgctggatctcctgcggatggtcggtggcgggcggcggggcttccggcgttccctgcagggcgctacacccgctgaggacgatagccagtaaccacggtgaaaacctgcgcataaccatatctcgtttcctgatagtgatagtgtagtggtagccttaacaggattgccggggaatgttcccgaactgttatctctgacgcgattttcgaatgaaaatgttgtgaaagcgtaaccgggttctcaacattatgaatcgtagcaaactgggttgcctggtgaatgaattttcccatgacgcctaaccacgatagagaaggaagacgataaatgattgcactagaaatgcgcaacctcggcggtggtgaaattttacatgcctgtccgcaggagagtctggataagcccttgccctgtatcgtcttttatcatggctttacctcgtcgaagctggtctacagctactttgcggtggcgctggccgaggccggattccgggtgatcatgccggacgcgccggagcatggggcgcgctatcagggcgatgaggccgggcggatgcagcgcttctggccgattctgcagcagaatttcagggagtttcctgcgctgcgcgaggcgataatcgctgaaggatggctggaaggggagcggctggcggtggcgggcgcttcgatggggggaatgacggcgttgggcatcatgacgcatcaccccgagctgaacagcgtcgcctgtctgatggggtcgggctattttcgttccctgtcgcaaaccctgttcccctcgcctgattttgatgtcgatagcctcaacgaatgggatgtcagccatcagctggcgtcccttgcccggcggccgctattgctctggcatggcgatgccgatgacgtggtgccgccggaagaaacctttcgactagaacaggcgctccggcaggcggatcttgccgccaggctgacctgtgtctggcagaaaggcgtccgccatcgcattacgccagaggcgctggctaccacggtcgccttttttcagcagcacctttaaacgcggattacgctgacgccctgatcctcaagctgtttgaggatcgcggcatcggcctgtttgccggtgatcaccacgtctatttgtccggcctggctgaatagcatcccggcgcgctcgccgatcttgctgctgtcgaccagcaccgccagtttgccgaccacgttaagcattttttgctcggccatggcggtcaacatatccgttttgtagaggccttcggcggtgagccctttgccgctggtaaacatccagtgtccggcatagaggctgttctcgctaccgtgggggctgagggtgatggcgtggctgcggttgtactggccgcccatgataatcacgctgtcatgctcctggtcgatcaggtagttagccagcggcagatagttggtgatgatctgcaccggtttgccgcacagttcccgacccaacagaaaggcggtggagccgcagttaatgacgatgctctcacccggcgcgatcagttgcgaagcggcgcgtgcaatacgcactttttcatccagattttgcgcctggtggatgttcatcggcgtccagcgggggcgctgttcgctaatggcttccgcgccattacgaacctttttcagtttgccgctttcatccagcttgttgatatcacgtcgggcggtagcgggtgagatcccgagccgcgacatcacctgctccacggtaacaaaccccgtttgggcgagcagatccagcagaatttggtgcctttgcgcttccgtcatgagcgaatccgattaaaagtgaacggcaaagatgatatttgaaatcatgtgaaaatactaaccctgcggcggggtatttccggcaggcagggcctgccggcggcgacttacaggaaggatttgaaaggcagatccggctcaatggtgaagcaatcgttgaaaccgcgcgggtagtgatattcgaaattgtctttatccagcggccaggtaaatttgccgccgacctgccagataaacggcttgaagccgtacttcagacgatcctttttcatctcccacagaacgcggatctcctgcggatcggcctgaaagtttgaccagatatcatggtggaacgggatcacaactttggcgttgagcgactctgccatgcgcaggatatcggcgctggtcattttgtcggtgatcccgcgcgggttctcgccatacgagccgagggcgacgtcaatccgatgctcgttgccatgcttcgcgtagtagttggagtagtgggaatcgccgctgtggtacaggttgccgcccggtgttttaaacaggtagttgaccgcgcgctggtccatgccgtccggcagtacgccagcggctttttggtccgccgggagggtgatcagcgcggtgcgatcgaacgcatcgagcgcatggatctcaatgtctttgatcttcacgacatcgccaggtttcatgacgatacagcgcgctttcggcacgccccaaccgatccacaggtcgacgcaggttttcgggccgataaacggcacatcggccgggcagttctgcatgacggcggcggcgacgttgacgtcaatatgatcgttgtgatcgtgggtcgcgaggaccgcgtcaatctggcgaatggcgaacggatccagcacgaacggcgtggtgcgcaggttaggctgtaattttttcacgcctgccatccgctgcatctggtggccagttttcatcagcggattgccgtggctctgtttgccagtgccgcaccagaaatcgacgcagacgttagccccgccttcggattttaaccagataccggtacagccgagccaccacatggcgaaggtgccgggcgcaacctgctcctgctcaatctcttcattcagccagctgccccattccggaaaggtgttcaggatccatgattcacgggtgatggtctgtactttactcatcgtgctcttcctcgtattttcaatagtaatcaaattttgattggttttgatttatgttgtcactggattttcaagattgcaatcttgttttccatcaattttacgaagatatgcgcatcacctctcaagggttccagcatccataaaggttgtgcttttctttatctatatgatttgaaaatgtttaattatatttctgcgctactgatcggcaatagtcacaatgaaatagaggattattgcggcgcgcgtcacatttaatcaaattcaatcttgttgtgattatttttgattattagagtgggcagcgagaaatgctgagcgtaaggcgcgttcagcgccttcaccatcgggagtgtgttatggcaatcctctacaacatctttaccgttttctttaatcaggtgatgaccaatgccccgctgctgctgggtatcgtcacctgtctgggctatatcctgctgcgcaaaagcgtcagcgtgattattaaaggcacgatcaaaaccattatcggcttcatgctgttacaggccggctccggcatcctcaccagcacttttaaaccggtggtggcgaaaatgtcagaggtgtacggcatcaacggcgcgatctctgacacctatgcctcgatgatggcgaccatcgaccggatgggcgaggcctatagctgggtgggctatgcggtgctgctggcgctggcgctcaacatctgttacgtcctgctgcgccggataaccggcatccgcaccatcatgctgactggccatatcatgtttcagcaggcggggctgatcgccgtctcgttctttatctttggttacggaatgtggacgaccatcatctgtaccgccgtgctggtctccctgtactggggtatcacctccaacatgatgttcaagccgactcagctggtcaccgacggctgcggcttctccatcggtcaccagcagcagtttgcctcgtggattgcctacaaagtggcgccgtatctggggaaaaaagaggagagtgtggaagacctcaggctgccaggctggctcaatatcttccacgacaacatcgtttccactgcgattgtcatgaccattttctttggcgcgatcctgctttcctttggtattgacgtcgtgcaggcgatggcggggaaaacccactggacggtctatatcctgcagaccggtttctccttcgcggtggccattttcatcattacccagggcgtgcggatgttcgtcgccgaactgtccgaagccttcaacggtatctcgcaacgcctgatccccggcgcggtgctggcgattgactgcgccgcgatctatagctttgcgccgaatgcggtggtgtggggctttatgtggggcaccatcggccagctgattgccgtcggcattctggtaggcattggctcttcaattctgattattccgggctttatcccgatgttcttctccaacgcgacgattggcgtctttgccaaccacttcggcggctggcgcgcggcgctcaaaatctgcctggtgatgggcatggttgaaattttcggttgcgtgtgggcggtgaagctcaccggtatgagcgcctggatgggaatggcggactggtcgattctggcgccgccgatgatgcagggcttcgcctccatcgggttggcgtttatggctgtcatcatcctgattgctctcgcttatatgttcttcgctggccgcgcgctgcgcgccgaagaagacgcggaaaaacaactggcagaggcctctgcccaataaggagttctgattatgaccgtacgtattctggctgtgtgtggtaacgggcaaggcagttctatgatcatgaaaatgaaagtggatcagttcctgacgcaatccaatatcgaccacacggtgaacagctgcgcggtgggtgaatacaaaagcgaactaaacggcgcggatatcatcatcgcttcaacccatatcgcgggggagattaccgtctccggcaataaacacgtggtgggggtgcgtaatatgctttcccccgcggatttcgggccaaagctgctggaggtgattaaagctcatttcccgcaggacgtgaaataaggagcggctatgaaactccatgaatcactggcgcagaatcactccattcgcctgcaggcggaagcggaaacctggcaggaggcggtgaaaatcggcgtcgatctgctggtggccgccgacgtggtggaaccgcgctactaccaggcaatcctcgacggcgtcgcgcagcacggcccctattttgtgatcgctccgggattagccatgccgcacgggcggccggaagagggcgtcaaaaaaaccggctttgcgctggtcacgctaaagaaaccgctgattttcaaccacgaagataacgacccggtcgacatcctgatcaccatggcggcggttgacgccaccacccaccaggaagtgggcatcatgcagatcgttaacctgtttgatgacgaagccaatttcgaccgtttacgcgcctgccgcagcgagcaggaagtgctggatttaatcaaaaacgccaccgcggcggctgtttaaaaggaacactatcatgtcattacctatgttacaggtcgccctggacaaccaaacgctggccagcgcttatgaaacaacccgtctgatcgccgaagaggtagatatcattgaagtcggcactatcctctgcgtcggtgaaggtgtacgcgcggtgcgcgatctgaaagcgctgtatccgcataaaatcgtgctggcggacgccaaaattgccgatgccggcaagatcctgtcgcggatgtgcttcgaagccaacgccgactgggtcacagtgatctgctgcgccgatatcaacaccgccaaaggggcgctggatgtcgccaaagagttcaacggcgatgtgcaaattgagctgaccggcttctggacctgggagcaggcgcaggcgtggcgcgaggcgggtattcagcaggtggtctatcaccgcagccgcgacgcgcaggcggcaggcgtggcgtggagtgaggcggatatcagcgcgattaagcgtctgtctgatatgggcttcaaagtgaccgtcaccggcgggctggcgctggaagacctgccgctgtttgccgggatccctgttcacgtctttattgccggacgcagcatccgcgatgctgcctcgccggtggaagcggcgcgccagtttaaacgctctatcgcccagctgtggggttaaggagcgactatgttggcgaaatccattccgctcggcatctatgaaaaagcgctccccgccggggagtgctggctggagcggctaaagcttgcaaaagcgctgggctttgatttcgttgagatgtctctcgatgaaacggacgcccgccttgcgcggctggactggagcccggagcagcgtctggcgctggtcaaggcggtggctgaaaccggcgtccgggtgccgtcgatgtgccttagcgcccatcgccgttttccgctgggtagtgaagacgacgcggtgcggcatcaggggctggagatcatgcgtaaagctattcagctggcgcaggatgtggggattcgggtgatccagctggcaggctacgacgtctattaccagcaggcgaacgatgagacgcgccgccgctttcgtgacggcctgaaacagagcgtcgagatggccagccgagcccaggtaaccctggcgatggagatcatggactacccgctgatgaactcgatcagtaaagcgctgggctatgcccattacctgaataatccgtggttccagctttacccggatatcggcaatctgtcggcgtgggataacgacgtccagatggagctgaaggcggggagcgggcatatcgtggcggtacacgtcaaagacacaaagcccggcgtctttaaaaacgtgccgttcggcgaaggggtggtcgattttgaacgctgcttcgaaacgctcaagcagaccggctactgcggaccgtacctgattgagatgtggagcgaaaccagcgctgacccgctggcggaggtggcgaaggcgcgtgactgggtgaaggcgcggatggcccgcgcgggcctgatggaggcggcataatgcaacagctgaaacagcaggtgttcgaggccaatatggatctgccgcgctacggcctggtgacctttacctggggtaacgttagcgccattgatcggcagcgtgggctggtggtgattaagcccagcggcatcgcctacgagtcaatgaccgtcgatgacatgtcggtggttgatctgcaggggcacgtggtggaagggcgctggcgtccctcctctgataccgccacccatctggcgctctatcgccgttatcccgaccttggcggggtggtgcatacccattcgacgcacgccaccgcctgggcgcaggcggggctggcgatcccggcgctcggcaccacccatgcggactacttcttcggcgatattccctgcacccgggcgcttagcgcacaggaggtggacgaggcctacgagctgaacaccgggcaggtgattatcgaaacgctgggtgaggccaatccgctgcataccccggggatcgtcgtctatcagcacgggccatttgcctggggcaaagacgcccacgaggcggtacacaacgcggtggtgatggaagaggtggcgcgcatggcgtggattgcccgcggcattaatccgcagttgcagcccatcgatagctggctgatgaataagcattttcagcgtaagcatgggccaaacgcctactatgggcaaaagtagatagcgcgctccggggctttcacccctcacggtgaagcaactggtctggccccggagccgtttttaatcctgacgataggccgacggcatcacgcgcatgccgatgagcgtgaccacgcaaattatcgccccggcgtaaaacgtcgaggcggcgccgaaggtttcccacagtacccccgcgccggtgctggccagcagcagagccaggccactcatcagattaaacataccgaacgccgtgccgcgtagctccggtggcgccgtatgggcgaccatcgccgccagcaggccctgggtcattcccatatgaatcccccacagcgcgacgccgatcagcagcgtgctccagtggccgctgagcgccagcacgatatcggcgaggatcagcaccagcagcccccactgcagcagtttgctgtggctcatgctgtctgagagtttaccgaacgggtaagccgtgaggctgtagaccaggttcatcgccaccatcaccagcgggatggtaaagagcgggatctccatctgctgggcgcgcagcaccagaaaggcttcgctgaagcgggcgagggtgaaaatgctgccgatcgcgaccacccaccagtaggcggcggagagctttttcaggttttcgcgcttcagcggattgctgcgtttgtgcgcgatggcggattttggctcctgtaggccgaatccgagcaggagaatggagagcacggcgggaatgaccgccacccagaaaatagcgtgaaaatcgttggcccagataaacatcagcagcaccgccagcagcgggccgagaaaggcgccgacggtatccagcgcctggcgtagtccgtaggcggcgccgcggatctccggcggggtgacgtcggcgaccagcgcatcgcgcggcgcgccgcgaatacctttgcctacgcggtcaatcatgcgggcgctaaacaccaccccggcggtaggggcgatggcaaacagcggtttactgagcgcgcccaggccgtagcccagcagcgccagtcctttacgcttgccgacatagtcgctgattgcgccggagaagaccttcaggatcagggcggtggcttccgccagtccctcgataagaccgataattatcacgctggcgccgagggtagtggccataaacagcggtaagaggctatggatcatctcggaggagacatccatcagcaggctgacgccgccgagtacccaaacgcctttggggatacggcctaaggtggcgaaacgcggaaccatcaatcactcctgattatcaaatggcgagtggctgattaaatcaggttgcgatgacgctggtaagtcggtttgtaaaataattctcaattgcgtttgggcgcagacctcgcttcgcccctcgcgaggagaggcgaagaatcgggcaggcgttagcggtatatcaccgcgctggcgcgaagcgggccgttggtttcgggttcgtgcatcaggataggctgaaagtatttcgccccctgcgcatcgctcatctggctaagggcctgttcggcctcgtgctcagtggccatattgtgattgatatagataacgccgaggctctgcacgtcgtccatgttgcgggcctgacgttcggtgatttggatagctgccagcgcgttggcgctgaagaaaagcgcagccatcatggcgatgattttcagtttcatatactacgctcctgactgacagtcctgacgctgactcggggctctcctgtgatcgttgggctttgatagaagtgtaatcgctgcgcgttcatcgcatggcgaccttttctgatgcagttgttcaaaaaaatgccgcttcctttattggttaattttaaatcacccacttagcccagcttggcgcttagtgcgaattatttgtgcaaatgcgcttgtgttcctgaggggccgccattagaatgacgcgtcaatttttcagccgccctttaacacgttccttgcctccatgggccgcggctgacccagacaggaggctgaataatccgtaaggagcaattcgatgcgtcattacgaaatcgtttttatggtccatcctgaccagagcgaacaggttccgggcatgatcgaacgttacactggtgcaattactgcagcagcaggtacgatccaccgtctggaagactggggccgccgtcagctggcttatccgatcaacaaactgcacaaagctcactacgttctgatgaacgttgaagcgccgcaggaagcgatcgatgagctggaaactaacttccgcttcaacgacgccgttatccgcagcatggtaatgcgtactaagcacgctgttaccgaagcatctccgatggttaaagcgaaagacgagcgccgtgagcgtcgcgaagatttcgccaacgaaaccgcagatgattctgaagctggggattctgaagagtaatcctgatgaccaaccgtctggagctgtccggcattatttgcaggactccacttcgtaaggtcagcccgtcaggaattcctcactgccagttcgtgcttgagcatcgttcagtgcaggaggaagccggttttcaccggcaggcatggtgtcagatgcccgttattattagcggtcacgaaaaccaggccattactcacagtataacggtcggtagcgcagtaaccgttcgagggttcatctcttgccataaggcaaagaacggcttgagcaaaatggttctgcatgccgagcagattgaattgatagattctggagactagccatatggcacgttatttccgtcgtcgcaagttctgccgtttcaccgcggaaggcgttcaagagatcgactataaagatatcgctacgctgaaaaactacatcaccgaaagcggtaagattgtcccgagccgtatcaccggtacccgtgcaaaataccagcgtcagctggctcgcgctatcaaacgcgctcgctacctgtccctgctgccgtacactgatcgtcatcagtaatcggtcacggtccattaatacgactttgagaggataaggtaatgcaagttattctgcttgataaagtagcaaacctgggtagcctgggtgatcaggttaacgttaaagcgggctacgctcgtaacttcctggtcccgcagggtaaagctgttcctgctaccaagaaaaacgttgaattcttcgaagcacgtcgtgctgaactggaagccaaactggctgacgttctggcagcagctgaagctcgtgctgagcagatcaacgctctggaatccgtaaccatcgcgtctaaagctggcgacgaaggtaaactgttcggttccatcggtactcgcgacatcgctgacgctgttactgcagcaggcgttaaagttgctaagagcgaagttcgcctgccgaacggcgttctgcgtaacgttggcgagcacgaagtgaacttccaggttcacagcgaagtattcgctaaagttatcatcaacgtggttgctgagtaatcggcctctgacgttctggtaacaacaaaccgccggccttgtgccggcgttttgctttttagcgcctttcattttgcggcggcgtaacgcttgctgtcgtcttctctgctatcgcgcacgcacaaagctgccgttcgactggcgggtaaacagcacctgctggccgttgccggtatcgatagtgagcccggtgaccacgccgttggcgttctgccgaatctgcaccgtctgtccgctctgcaaagtacttagcggcttgccagcgccttcaacctgcgccatggcgtagacgtcagtggccggcagcccatgatcgcggaacagctgcgccagggttttgcctgactcgatgcgataggtccgccattgctgctcaatacccggcgcggactgctgtgatgaggattgataaggctgggtggcggcgggctgctgcgtctgcgcctgatccggctgctcatcctgaatcggctccggagcgaccggcgccatctgatcggcgtcgctcacggtaggcgtattagtgatcggcggcagcggaacggcctgattgccgccagcttgcggctgggactgcgactgtagattcaggttcgcttcacggctggtggacgccgggctttggctatcatcggagggaagcagaataccgataataaccaacaggaagccagcgataattccccggcggtgcatcggaggcagcgggtccaggaggcgaaaatgatccggggcgtgccagattttcgccagggtagatgtcagttcaaagcgcccgggcatggctttcctcctgctccgcatatttatatcctgctcatgagtatagatggctaacgtcctgatgaccggaacaaagtgaagttaacctgctgccgcctattgtttctttttcgctgagatttgtcatcatccgccgacaaagttttacccatttcgctatggctgttatgctttcgcacgcttttatcttgatggttatcacccaaaaaggaacgacgatggcaaccccaacttttgacactatcgaagcgcaggcaagttacggtatcggcttgcaggttggacaacagctgagcgaatccggcctgcaggggctgctgccggaagcgctggtggcgggtatcgccgatgcgctggaaggtaaccagccgcaggtgccggtggaagccgttcaccgcgcgctgcgtgaaatccacgagcgtgctgacgctgtgcgtcgcgagcgttttcaggccatggccgctgacggccaaaaataccttgatgaaaaccgcgagaaagagggtgtgaacagcaccgagtctggtctgcagttccgcgtactgacccagggcgaaggcccgatcccggcgcgtactgaccgcgttcgcgtgcactacactggcaaactgatcgacggcaccgtcttcgacagctccgttgctcgcggtgaaccggctgaattcccggtgaccggcgtgatcggcggctggattgaagcgctgactctgatgccggtaggttccaaatgggaactgacgatcccgcacaacctcgcctacggtgagcgcggcgctggcgcatcgattcctccgttcagcaccctgatcttcgaagttgaactgctggacattatctaaacagcagcggcttcctcttccccgcggcaggggaagccataaaaatagcgtaaaatccttaagttaaaaattaattggaattatgttttgcattcatcacgtatgggtgtatttttgtgagctatttcgcgttagatgagtgatataacactcactttaaacataaaattaacattatatctaaatcatagtattcatccctccgattcttacctaatatcgactagcccttgctggggttaatgacagacgacgggccatcagagcctgaacaacacagacaggtacaacaggaagaaatcacatggtagatcaggttaaagtcgctgctgtcgagcaggagccgactgaacaatcgctacggcgaaatctcacaaaccgacatattcagctgatcgcgattggcggagcgatcggcaccgggttatttatgggttctggcaaaaccatcagccttgccggaccatccattatctttgtttatatgattatcggttttatgctgtttttcgtgatgcgtgccatgggcgaattactgctgtcgaacctcgaatataaatcctttagcgacttcgcggccgatctgctggggccgtgggcgggctactttaccggctggacctactggttctgctgggtagtgaccgggatggcggacgttgtcgccatcaccgcctacgcgcagttctggtttcccggactctccgactgggtcgcctcgctggcggtgatcctgctgctgctgggcctgaacctggccaccgtcaagatgtttggcgaaatggagttctggttcgcgatgatcaaaattgtcgccatcgtggcgctgatcgtggtcggcctggtaatggtgatgatgcatttcaaatcgccgaccggggtcgaagcctctttcgcccacctgtggaatgacggcggctggttcccgaaagggctgagcggcttcttcgccggcttccagattgcggtgtttgccttcgtggggattgagctggtgggtaccaccgccgccgaaaccaaagacccggaaaagtccctgccgcgggcgattaactccatcccgctgcgtatcattatgttctacgtcttcgcgctgattgtgattatgtcggtgacgccgtggagctccgtggtgccgagcaagagcccgttcgttgagctgttcgtgctggttggtctgccggcggcggcgagcctgatcaacttcgtggtgctgacctccgcggcctcctcggccaacagcggcgtgttctctaccagccgtatgctgttcggtctggcgcaggatggtcaggcgccgaagatgttcgccaagctgtcgaagcgtgcggtgccggcgaagggcttaaccttctcctgcatgtgtctgctgggcggggtggtgatgctgatggtcaacccgagcgtgattgccgccttcaccatgatcaccacggtgtcggcgattctgtttatgttcgtctggaccatcatcctttgctcttacctggcgtatcgcaaaaaccgccctcagctgcatgagaagtcgagctacaagatgccgctaggtaaagtcatgtgctgggtgtgcatggccttcttcgtctttgtgctggtgctgttgaccctggaagacgatacccgtgaagcgctgatggtcaccccgctgtggtttgtgctgctgggcgcgggctggctgtttgccggcaaaaaacggctggcgaaataaacgaaaattttaacgttgcttgcaacggcccgtcataaaaaaggccacccagagtggccaaataagacggacaatgtcgagggcgcccgcgggcgcctttttctttactttccgccgagggcgcgcgggaacagcacattattttccaggctgatgtgttccatcagatcgtcgatcatctcgttgataccgttatacatcgccttccaggtggtacaggcttccggcggcggcgtcacgttgtgagtgatgtgcttaatgacttccagcagttcacccgcttcatcatgctcgctttccatcacgctgatcggccccccggcctgggcgcccattccctgtttaatcatcgggaacaggatctgttcctctttcatcatgtggctggaaagctcctgatgcagcatggtcaggtacttagtcagtcctttcggcacgttcggtttatcggcatggacgcgttcaaccttggtggcctgcaggatcagctccggcagctgttcacggtgccggtcgtgatagcgaacgatgatatggtcgataatctccgcgaggggcgccgcgcgccagtcgcgggagagaggctgttcggccagtttcgccagctcggcttcaatcaccgcgacatccagcgctttgcgcgacgcggcgcgcgccagggtctgtttgccgccgcagcagtaatccatatcgtattgacggaacagggcggaggcgcgcgggatggtcagcgccagctcgcctaaaggttggtcacggaaagccatagcagttacctcgtcatcaggaatataagatgtattttaaatgcatctttttggcgagggaataccccttaaggaggcgaggctactttttttcgtccgccagcggctgcagcatcggtttttccggtctggcgcgtacggcagagaccacgccgagcaccagcagcaggatcccgctcagggtcagcagcggcggtaagctttgccgcagcaggaaggtatacagcagtccggccagggtttcgaagacgataagcgggccgaggatcaccgtcggcagccgctggctggcaatattccagcatagcgcgccgacccatgagcagagcaccgcgatggccagcatcagcgtaataaacaccgccggacgcgggccgaagggcaggggaaacccggcctgctgaccgtgcagccaggcgcaggcggcgagatagccggccagcgaaaccggaagcgtcaccagcgcctgagcggtagcccacatcattggcggttgatgcgggttctcccgcagccagcgggcgttgcgcagagcataccaggcccagcagaccaccgatcccagcgccagcgcaatgccggagccgtagcgccacgggctaaaattcggcagcccctgacgcagctccgcgacgttaacgcagatcaggcccacggcgatgcagatcagcgccggaaacaggcgccgccacggcagcttcccgtcgcgctggctgtagagcagattggcgaacaccggcagtaccaccggcagcgtgccgataatcatggtggaaaccggcgccccggtgcgctgaatggcgctggccaggcagacgtaatagataaggttccccatcattgtcaggcccagcgcggtccaccagtcgtgccggctcaactggcgcagtcgcgcgcgcccgagccacgccagcggcagggcgatcaggcccagcgccagatagcgtcccatcgactgcagcatcgccggatactctggcaccagcaaaggcccgacgaaaattaaaccccacatcagccccgccagcagggcgtataacacaccactaatcatcattgcatccgttgtcattaccgttgtctgcagtgtagaagggggtcgggcaggaatattgtatgagattgcgcattagcgcctggcgacctgcttctgatagcgcaccggcgtaatgccgtaacgctgggtgaaggcgcgggtcaggtgggactggtcggtgaggccgacggctatcgccacttcggcggcgggcatgccgtgggtgaggaacgctttggcgcgccacagacggatggccatcagcatctgatggggcgttacgtgatagtgggctttaaactggcgctgaaagtggtacgggctcagcgccgccacctgcgccagctcgtcgagggtgatgggacgcatatagttatcgtgcaggtagtcgcgcacgcggtcaaagcgatgcccggcctcaccctgcgcagaggcatggtgggccagagggcggaaggcgtcgatgaggtcgagcagcagtccctgctgggccagcggatcgtcgctatgccacaggccataaatcagctggccaatctgtcgggaacgcaggggatcctcgcggaccacctcgctgaaccaccagtcgcgcaccccggtgatggcttccagacggtccggctccagataaatcatccggtagcgccagccgtcggcggtttccgcttcgccggtgtgcagctcgtcgggattcatggtgacaatggagtttgcggcggcaatatgctgactgccgcggtagcgaaagcgctccgcgccttgctcaatcacgccgatgccgaaggcttcgtgggtatggggttcaaaggcgtagcgggatatatgggcgtggtaaagctccaccccgggcagctgttcgagatggcgaaagcgcgcgcggtctttttcatcactaaattggagtggtacgccctgcatgcctgcctcccgacggttatcccttcaatatgagagaggaaccgccgggacgcaaccgcaaaagctgagaggggcggttacagaatgcctttcacgctttcagcaagggaggtggtcgggcggccgatcagcgtactcagggtgcggctgtcgtcaaacagtccgcctttcgacgcgccgacatcggaatccgccagcatatcggcaagcccggccggcaggccgacgcttttcagcgcggcggcgaaatcggcttcgctgaggttctggtagaccacgtttttcccgctttgcttgctcagctcggcagccaggtcgctcagcgtccaggcgttatcacccgccagttcgtaaattttgccttcatgaccctcactggcgataacgcgggcggcagcggcggcataatccgcgcgggtggcggaggcgattttaccctcgccggcggcgccgataaacacgccatgctccagcgccggcggcgcgctggccagatagttttcggtataccagccgttacgcagcagggcgtaagcgataccagagtcggccagcatctgctcggtttcgatatgctctgcggccagacccagcggcgaagtgtcggcatgcagcaggctggtataggcgatgaatttcaccccggcggctttggcggcgttaatgacgttgcggtgctgtacagcacgctggccgacttcgctggaggagattaacagcagtttatccacgccctgcagcgcggcggtcagcgccgcttcgtcgctgtagtcggcctggcggacaaccacgccctgctggctgagcgcctgggctttggccgggttgcggacaatcaccacaatctggctggcagggacggtgttaagcaggtcttgcagaacgtagtggccaagctggccggtggcaccggtaagagcgatcatgggtcttctccttcgtgtttattggcagttgtggtaagctaccaccttaactaacttttagtaagtacgtacaaaaaggtaagtgtgaaatggccgaaccgacgctgagcgagaaactgcgcaccggcaatttgtttgcggaacagtgcccgtcgcgcgatgtgcttaaacatgtcaccagccgctggggcgtgttgattctggtggcgctgcgcgagggaacccaccgtttcagcgatctgcgccgtaagatgggcggggtcagcgaaaagatgctggcgcagtcgctgcaggcgctggagcaggatggttttatcgaccgcgtctcttatccggtggtgcccccgcacgttgaatatagcctgacgccgctcggcctgcaggtgagcgagaaggtggccgccctggcggactggatcgaggttaatctgccctcggtgctggctaaccacggggagtgaaaatgtatcactccctgtagccccggtaagcgcagcgccaccggggaacaggcattacttgctcaaatccagctgataaatggcgaagccgatatcatcggtggccacctggcgcattggatactgcgctttctctttgataaacgccgcggctttgtcgccaggcgaggtctcaaaacgaatatccaacggcgtgttgctgtggatcggcgccagacgccagttgttatccgccgccggatggatcgcgccttccttcttcgattgcgcgccaatccacgccgccagcaccgaacggttttcatccggtgaggcgaaggcgatatggctctcaccggtgccggcgaatttgccgccgtaagcgcgatagttattggtcgcgaccaggaaagtagcctgcggatcaaccggttttccattgaaggtcaggtgcttaatacgctctgcctgcggatggatcatctgacattcgccgtcgtagcgggccggctgagtgacgtcgatctggtagttcaccccgtcaatgacgtcgaagttgtaggtgcggaagccgtcccagttgatcagcgactgcggcttgctgctggcgggatcgatctggttaaactgtccggcagagcattccagccactccttaacctctttcccgctgaccttcatcaccaccagggtgttggggtagagatagaggtcggcggcattgcggaaggtgagctggcctttctccacttcgacaaagctcgccggatcgtttttacgcccgccgactttaaacggcgcggcggcggagagcaccggcagcttcgccagatccgggtcgccctgaatatagtgttcgacgtaggctttctgcgccatgttgaccacctgcaccgtcgggtcgtcctgcaccagcgccagatagctgtacatgttgtcggcggacttgccgatcggcttgctgacgaattcgcgagtggcgtcatgatcggctttcagcaccgccaccagcttgccatcttcggccgccagtgatttcttcgccaccgcgtcatagattggccgcgcttccgctttactctgagttacctgccatttaccgctgtcgttatttagcaccagatcgaccaccccgagatgatcgccccacattcccggcatcaccgccggtacgccgttcagcgtccctttggcgatatccgcgcctttgatgttggcgaagtctttacccgggaacaccgcgtgggcatggccgaacataatggcgtccacgccgggcacctggcttaagtagtaaaccgaattctcggccatcgcctgatacgggtcggcggagaggccggagtgagcgaccactaccaccacatcagcccctttcgcccgcatctccgggatatatttgcgcgcggtttcggtaatgtcattgaccgtcaccttgccgttaagattggctttatcccaggtcatgatctgcggcggcacaaagccgatatagccgatgcgcagggtgtgggattgaccgtcgctgtccacgacccgggtatcctggagcaggtacggcgtaaacatcggttttccggttttggcatcgatgatattggcgttcacgtaggggaacttcgccccggccagcgccttgtgcaggaagtcgagaccgtaattgaactcatggttgcccaggttgccgacggcgtaattcagggtgttcatcgccttatacaccggatgtacatcgccctctttgagcccttttgccgccatatagtcgcctaacgggctcccctggatcacatccccgttatccaccagcacgctgtttttaacttctgcccgcgcctgttcgatcagggtggcggtacgcaccaggccgaatttctccgtggcggcatctttgtaatagtcgaagtccatcatattgctgtgcagatcggtggtttccatgatccgcaggtcgaccgtcgcggcgttgacgctggcggcgatcagcgtggccaggagcgttgcgctaaacttaatcatcagaggcgtccttttttatgagcgatagcacagaagaaaatgtatttatattctgttgcttacagaaatgtgaatcttgccagaaaagcgggcagagaaaccgccatcgttatcacagatagcggaactcgcggtgatgcgatataaataaaacaacgagttaacgccactgtaaccagacgaggtggagaatgttagaacaagtatgtcagcttgcacggaatgcgggcgatgccatcatggaagtctacgatggaaaccagccgatcaacgtcgccagcaagaaagatgattctccggtcacggcggcggatatcgcagcgcataaagtcattgtcagcggcctgcaggcgctggatccggataccccgatcctctccgaggaggacccgccggcgtgggaagtgcgccagcactggcagcgctactggctggtcgacccgctggacggcaccaaagagtttattaagcgtaacggcgaattcaccgtcaatatcgcgctgattgaaaacggcaagccgacgctgggggtggtctatgcgccggtgatgaaggtgatgtacagcgcgcaaaatggcaaagcctggaaagaagagtgcggcgtacgcaagcagatccaggtccgcgatgcccgtccgccgctggtggtgattagccgctcccatagcaacgatccggagctgcaggagtaccttgagcaacttggcgaacaccagaccacctcaatcggttcgtcgctgaaattctgcctggtggcggaaggtcaggcccagctctatccgcgcttcgggccgaccagcacctgggacaccgccgccggccatgcggtcgcggtggccgccggggcgcatgttcacgactggcaggggaaaaccctcgactacacgccgcgtgaatccttcctcaaccccggcttccgggtctctatttattaagcaatttatgcagcaggtcgatcacctgctgcacctcttgttgggtgagggcgccgtctttagcccactgcacacgcccgttcttatccagcaccacgatcgccgagctcttctcgtccagctgccaggccttccgcaccaggccgttgctgtcgacgataaattgcgaccatgggaagagctttttattactttcaatgctgttgcgtacaaacatcccggtgcccgggatggcgtcgtcagtgtttacaatggtggtggtctgatagcgatcgtgcgggaagcccgccgctttaatcgcctcgatcaggttggcattcttctcttttgctgacgagcgtccggcgatgtgctggaccacgcgcacttttcccgccagctgggcgctattccagtttttatagctaaacttttccttatccagaataagctctccccgatccgcgacgccaacgggcgccacgcgctggccgtcgacgaagttatgcgctgtggccagcagcgggagaagcagtaacgaggcggccagtatgctacgtagggtcatgcgcaatccttaatcatttttatgcaggtgatccgaccacttggtctcgtttaatcataagtgcgattggcggtgattacccgcaatgaggatgccagtttgcgtgttgacgcacaaattagtcgtaaaacggcgacttatacttacttcatcgtatgtctgaaacgaaaattctgaattattgtcatcaaagggtaaataaacttatacatactgggtccctctgagattctggactatagttttagggcattaaaatttgcgctcccaagacgtgggctaactgtggcaccacaagagcgtaaccctggcaggagagaagaatgaaaattttccaacgctacaatccgctgcaagtggcgaagtacgtgaagatcctgtttcgtggacggttgtacatcaaggacgttggcgcatttgaatttgataagggcaaaatccttatcccgaaggtcaaggacaagctgcatctgtcagtgatgtccgaagtcaatcgtcaggtgttgcgtctgcaaactgagatggcatagcctggcacgtagcagtacgtagtaggtaaaagacggctcccgatgggagccgttgatgtttttagcccttcatttccgcatagcgtttgcgatattcgcccggtgggatgccgttatgtttacgaaacaagcgggtgaaatagaccggatcgctgtagcccaccgataaagcaattttgttaagtgggagtgtgggataaccatttgggccataaaaaagggcggatggtcatccgcccttaggagagagaaaagattacgctcaggcgttctggctttccgccgtttccgcctgcttcggcaccagcaccgttggcttgttatcgatgcgggtcaccagcagctggtcgatacggtagttatcgatatccacgacctcaaacttatagccggagaacttcaccgcgtcggtgcgtttggggattttacgcagcataaacatcataaagccgccgatggtctcgtaattcccggactgcgggaactcgtcgatatccagcacgcgcatcacgtcatcaatcggcgtaccgccatcgatcagccacgagttttcatcgcgggcgacaatctgctcttccagcccctggccgacgaggtcgcccatcagggtggtcatcacgtcgttgagagtgatgatcccgaccaccagcgcgtattcattcatgatcaccgcgaagtcttccccggcggttttgaagctttccagcgcttccgacagggtcagggtgtccggcacgatcaacgtgttgcggatctgtacgccgccggtcagcaccaggctctggttcgccagcacgcggttcagcagatcttttgaatcgacgtaaccgataatgtggtcgatatcttcattacagacgaggaacttcgagtgcggatgttcggccactttattcttcaggctctgctcgtcttcgtgcaaatcaaaccaaatgacgctttcacgcggggtcatggaggaaggaacggtgcgggactccagctcgaacacgttctcaattagctcatgctcctgcttgcgcagcaccccggccagcgcgccggcctcgaccacggcatagatatcatcggaagtgatatcgtctttccgcaccatcggcagtttgaagatgcggaagatcatgttggccatgccgttaaacaaccacaccagcgggcggaagactaacaggcagaagcgcatcgggttgatgatgcgcagggccactgtttcgggcgcaatcataccgatgcgtttcggagtcaggtcagcaaacaggatgaacaagctggtgaccagggtaaaagagatgatgaagctcagctgctcggagagctccggcgacaaatacccgctgagcaggctatgaaacgccggtgagaaagccgcgtcgcccacaataccgccaagaatggcgacggcgttgaggccaatctgcacgacggtaaagaaggtgcccgggttctcctgcatcttcagcacccgctgtgcgttgacgttgccttcatcggccagcagtttcagtttgattttacgtgaggcagccagtgaaatttccgatatcgaaaaaaacgcactgacggctatcagacagagtattactaaaatactgtttaacatatcttttctgaccgttgaggccagatcctcggaagggaagttgataactcaaatgtggaatacataaaaaaccggtccgaaggcgctggaccggctgtcacactggctagtatagcgtaagggaatgtaaagccgccagagcgttcattgaccgcctcgctgttgaggcggaaatcagaattacgcctgaggcggcaggcagacgccaatgccgccgatgccgcaatagccgtgcgggtttttatacagatactgctggtgatcgtcctcggcatagtagaacggtttggcggtggcgatctcggtggtgatgtgacgggtatcgtgcgcgtcgttcatcgccgcctggaagcgcgcgaggctggcctttgccgcctccgtctgttccggggtcagcgggtaaatcgccgagcggtactgggtgccgtggtcgttaccctgccgcataccctgcgccgggtcgtgattttcccagaacacctgcaataactgctcatagctaatcacctgcggatcataaaccacgcgtaccgcttccgcgtgaccggtctggccgctgcatacttcgcgataggtcggattgggcgtatagccgccagtgtaacctgcggcggtgctgtaaacccccggcaattgccagaacaggcgctcaactccccagaagcagcccatggcgaacagcgccacttccatccccgccgggacgttggtcatcgagtggccgttaactgcgtggagcgtcgccactggcatgggggtattgcgtccaggcagcgcatccgcctgggcgacaagatgcgttttatcaaatagactcacggttggcctctcaatacagaaatcgtcgttaaggttgtaacgaagcgtgtcttttaacacaataaatacgcgtaatacgtctagattaatacataagaattatttgggttattgccactttttcaaccctatgttgttagggttttgttaagccgtggagcggcgccagtgtttcctgtagaggaaacagggatattcaggagaaaatgtgctaaaaatccgccagttatgtgtcaccagccttttgctggtcagcggggtcgccagcgcagcgaatgtgcgtttgcaggttgagggattatccggggagctggagaaaaacgttcgcgcccagctttccaccatccagagcgatgaagtcacgccggatcgtcgctttcgcgcgcgcgtcgatgacgccattcgcgaaggtctgaaagcgctgggttattacgagccgacgattgaatttgatttgcgtccgccgccgaaaaggggacgtcaggtgctgatcgccaaagtgaccccgggagaaccggtgcgcattggcggaaccgaggtgattctgcgcggcggcgcccgcaccgatagcgactacctggcgctgctgaaaacgcgcccggccatcgggacggtgctcaaccacggcgattacgacggcttcaagagctcgctgacccgcgtcgccctgcgcaaaggctactttgacagcgagtttcttaagagccagctcggggtctccctcgaccgtcatcaggcgttctgggatatcgattacgacagcggcgaacgctatcgctttggccacgtcactttctctggctcgcaaatccgcgatgaatatctgcaaaacctcgtgccgtttaaagagggcgactactacacctcgcaggacctggccgagctaaaccgccgcctggcggcgaccggctggttcagttcggtggtggtggcgcctgattttgctaagtcgcggaaaaccaaggtgctgcctctgcagggcgttgtctcgcctcgcaaagagaacaccgtggaaaccggggtcggctattccacagacgtcggtccgcgggtgaaagccacgtggaaaaaaccatgggtcaactcgtatggtcacagcctgacctccagcgtcagcctctccgccccggagcagcagttcgactttacctataaagtcccactgctgaagagcccactcgaacagtattatctgatgcagggcggttttaagcgtaccgacctcaatgatacccaggccgactctaccaccctgggtgtctcgcgtttctgggagatgtcgagcggctggcagcgagcgattaacctgcgctggagcctggatcactttacccaggcgaacgtcaccaacaccaccatgctgatttatcctggggtctcggtgaaccgcactcgctcccgcggcggcctgatgcctacctggggcgattcccagcgctactcggtggactattccaacaccatgtggggctcggacatcaacttcatcgtgatgcaggcccaggacgtctggatccgtaccctctatgaccgccaccgctttgtggtgcgcggcaaccttggctggatcgaagcggacaactttgacaaggtgccgccggatctgcgctttttcgccgggggcgaccgcagtattcgcggctataaatacaaatctatctcgccgaaggacgatgacggcaagctgatcggggcctcgaagctggccaccggctcgctggagtatcagtacaacgtcagtggcaaatggtggggcgccgtctttatcgatagcggcgaagcggtcagcgatattcgcgagagcgatttcaaaaccggcgccggggtgggcgtgcgctggcagtcgccggtggggccgatcaagctggatatcgcccggccgatcggcgacaaagaagagcatggtttacagttttacatcggtctggggcctgaattatgagtttatggaagaagataagcctcggcgtcttaatcgtgttggtgctcctgctgggaaccgtcgggttcctggtggggaccaccaccggcttgcatctggtgttcaaggcggcggatcgctgggtaccggggctggaaatcggcaaagtgaccggtggctggcgtgatttaaccctcgataatgttcgctacgaacagcccggcgtggcggtgaccgccggtcagtttcacctcagcgtcaggttgcgctgcctgtgggacagcagcctgtgcgtaaacgacatcgcgctgcgcgatatttatgtcgccgtcgataccaagaagatgccgccctcagcgccggtcgaggaagaggacagcgggccgctgaatctctccactccttatccgatcaccctcagccgcgtcgcgctgcataacgtcaacgtcaaaatcgatgataccgcggtctccgtacgcgacttttccaccggcctgaactggcaggagaaaaatctgaccctgacgccgacctcgctgcaggggctgctgatcgccctgcctaaggtggcgaaagtggcgcaggagcaggtggttgagccgaaaattgacaacccgcagccgcaggaaaaaccgctcggcgagacgatgaccgacctcttctcgcagccggtgctgccggcaatgaccgatgtccatctgccgctgaacctcaatattcaggcgttccgcggcgagcagctgcgcctgaccggcgataccgatatcaccgtgtataacctgctgctgaaagtcagcagtatcgacggccagatgaagctcgacgcccttgatatcgactccgatcagggcaaggtcagcgcctcgggcagcgcgcagctgcaggataactggccggtggacattaccctcgccggaaccctgaacgtcgacccgatgaaaggggagaaggtgcagctgaaggtgggcggcgaagtgcgcaaaacgctcaaagttggagtggacttaagcgggccggtcgcggccacgctgcgcgcggatgcgcagctggcggaggccgggctgccgctcaatatggagctgaagagtaagcagctcgcctggccgttcagcggcgagaagcagttccaggccgacgatgtccagctgaagttcagcggcaaaatgaccgactatgcgctggccttctccaccgcggtgaaaggtcaatcgctgccgccggcgaaaatcgccctcaacgccaaaggcaatgaacggcagatcaatctcgacaagctgacggtcaacgccctggaagggaaaaccgagctgaaggcgctgctcgactggcagcaggcgatcagctggcgcggcgagctgaccctcgacggcatcaacaccgccaaagaggtgccggactggccgtcgaagcttaacggccggatcaagacccagggcagcctgtacggcggcagctggcagatgtcggtgccggagctgaaaattaccggcaacgtgaagcagaacaaagtggatgtggcgggctcgctgcagggtaacagctatctgcagtggaaaatcccgggactgcatctggcgttaggcccgaacagcgctgatatcaaaggcgagctgggggtgaaggatcttaatctcgacgccaccatcgatgcgccgcacctggataatgcgctgccggggctcggcgggacggcgaagggcttggtaaaagtgcgcggcactgtcgatgcgccgcagctgctggccgacatcaccgcccgggcgctgcgctggcaggagctgaccatcgcccaggtcaacgtcaaaggggatgtgaaatccaccgatcagattggcggtaacctggacgtgcgggtggatcgcatcagccagccgggggtcaatatcagcctggtgcagctcaatgccaaaggtacagagaaacagcatgagctgcggctacgcgtgcagggcgatccggtttccggtcagctggcgctggcaggcagcttcgatcgtcaggccgaacgctggaagggctcgctgagcgatacccgcttccagacgccggtggggccggtagcgctgacgcgcagcattgcgctggactatcgcaatctggagcagaaaatcagcatcgggccacactgctggaccaacccgaacgccgagctctgcgtgcctgaaaccattgacgcgggcgccagcggacgggcgcgggtgaatctcaaccgcttcgatctggcgatgctcaagccgtttatgccggaggcgacccaggccagcggcgtgtttaccggtaatgccgatgtgagctgggacaccaccaaagagggactgccgcagggcaaagtgaccctcagcgggcgcaacgtcaaggtgacccaggtcgtcaacgacgcgccgttgccggtggcgttcgatacgctgaacctcagcgccgacctgcacaacaatcgcgccgagctgggctggcttatccgcctgaccaacaatggtcaactggatgggcaagtgcaggttaccgacccgcaggggcggcgtaatctcggcggcaacgtcaatatcagcaacttctcgctggcgatgatcaacccgattttcgctcgtggtgaaaaggcagagggaaggctcaacgcccgtctgcgtctgggcggcaatgtgaaaagtccgcagctgttcggccagatgcagctgagcggggtggatatcgacggcaactttatgccgtttgatatgcagccgagccagctggcgatgaacttcaacggcacgcgctcgaccctgcaggggacggtgaacacccgccaggggcaaatcgccctcagcggtaacgccgactggacgcagatcgataactggcgggcgcaaattgcggcgaaaggcagccgggtgcggatcacggtgccgccgatggtgcgtctcgatgtatcgccggatgtggtgtttaccgccacgccaagcctgttcaatctcgacggcaaagtggatgtgccctgggcgcggatcgtggtcaacgaggtgccggagagcgcggtcggcgtctcctctgatgaagtgatgctggataaaaacctcaagccgattaagcagcagagcgccagcatcccgatcaacagcaacctgaccattcacgtcggcaacaacgttcgtctggaagccttcggcctgaaagcgcgtctgaccggtgatttgaaagtggcgcaggacaagcaggggctgggcctcaacgggcagattaatattcctgacggccgtttccacgcctatggtcaggacttgattgtccgcaaaggggagctgctgttctccggtccgccggatcagccgttgctgaatatcgaagcgattcgtaacccggatgccaccgaagacgatgtgatcgccggcgttcgcgtcaccggctccgccgatcagccgaaagcggagatcttctctgatccggttatgtcccagcaggaagcgctgtcttatctgctgcgcggtcagggtttgagtagtggtcagagcgatagcgccgcgatgacctcaatgcttattggtatgggggttgcacaaagtggtcaggttgtgggtaaaatcggcgagacgtttggcgtaagcaacttggcgttggacaccgaaggggtaggcgattcttcccaggtggtggtcagcggctatgtactgccgggtctacaggtaaaatacggggtcggtatcttcgattccctggcgacgctgactttacgttatcgcctgatgcctaagctatatgtggaagcggtgtctggcatcgaccaggcgctcgatttgctctatcagtttgagttttagcaatgcgaatatttgtttacggcagtttacgacgcaaacaaggcaacagccactggatgaccaacgcccagtggctgggcgctcatagtgtcgacgattatcagctgtacagcctgggccactatccaggcgcggtgcccggcgaaggcacagtacatggtgaagtttatcgtattgatgcatcgacgctggccgaactggatgcgctgcgcaccaagggggcgagtatgcgcgccacctgattcagacgccttacggcagcgcatggatgtatgtctatcaacgttccgttgagggttgtacgttgatagcgaacggcaactggttggatcgcgaccagtattaaccacgacagcgccaccttcgggtggcgttgttttttattacttcagttcccatggcgtcattctggcgccctgacgtctggcataacgtaatatggcctgatgtaccttcactctaccggccacccgacgtgacaggggatgggcaatcatacggacaaactccatcactattaacagcaggttaatcgggagcagggtgcctgtcagcctggtaagcatttcacgataaaatggccaactgcccagattaatcatggtgtcgtgcagtttgatggtgagcgtaaaaaacatcactatgagtacgaggccgtacgcgattttataaattgatgccatctgctgattgccgggatgaaaggggctattttttaaataaacactgccatcactgacattgtataacgcctgaagatcatcgtatccatgccggcgtgcggcgataacccagtccccatcggcaagaaatggcgggcgacaacgattattcagggcattgctcagccaggtcaagcgcgctgaaaaaaacgagtgacgagtcgccagctgaaaacaggcgccttctttgataaaataaggccttaccctcgtagcgatccatatttgataataactattcagaatcacgccttcttcaagcgcaaattcttttggcagcgctatctcgttgttggccgatggtggatgcctttcagaagtagcgggtagaatttccagacgctgacagaatgaaatatcgccttgcttcgttcgctgcattttcgcattgagaacacgtaacctgagtgagaaattgcaagagaaaaaagagaagatgccgaagggattcaccaacattgtgataaaacataataataaaaaaatatccaaccatggagcacaagcgagaatgatcaagcaaacaaaaaagaccaagccgacaggtcgaagaagctttttaatactcagcggctgccgggaaggttcgagcaaaatgtggccatcgcttaaccagtggatccagtaactgccatcctttaggcggcaagtgccgatatgtagcggctggccgagcctcagacggtcaaaaagcgaggggtctttaaaatggcgtttatcggtataaaaggcatgctcgcctgcaatgaggcgtaaatagctttgctcttcagaggcggcagtggtgaagccggtaaaattcacggtgaaataatgggtctgtttcacaaggttccttccttgatgaaatgatggtgttttacgtatcacgcgttgccgacccactccttaccagagcgggagatgatccttcgccagccacatcgcggaagccagcgtcgtcagcgcgaggaataataatcgtcgtgttggggtgctgaacattacatgatctcctcgagcgcggtatggcgggccgctccctgcaggtagtgccgcatcgccgagcgcatcttcatccagtcagccacccggtgtgacaataaccaggccgtcgggccaatcagctccagtaccgccaggatcccgccgaaactgagtaataatagggacagcatgtccagtgaatcctgaattaaccacccaaatcccctggctggtttgtatgggttatttagcgacatgccgagtatgaggaggtacatcaccagcaccatgccataaaacaggttatagactagcgacatttgccggtcaccgggataacagggatgatttttcagaaaagcgcacccgtcgctgacgttgtataacgccttgacgtcgttatctttccgttggtagacgacgactatccgatcgccgatagcgagaaagggcggttgacggcggtaaaaaaagggatgcaggccgaagttggcgaagccgttctgccagaagaaggccagcggcgccgtgtcgcattgtatcccaacgccatggtattcccgcgttgggttccccgcgaaccatttcttaaaaatgatattgctaatttttcccgtccggacggcatagcgttccggcagggcttgcgtaaaaggcttcgccgactggcggagggtttgcgccgtagtcggtagcggctggcaaaaggaaaagtcgcggcggcgggcctgcgccatcttcgccaacagatcgcgcatggcggggtgcatttttagcgcccggtggaacagtagctcgcagaggccggttaacaacgcgatgaaggccagtatcgcgataatgccgaagccgaaccttccccattctgaggtgatcatcatgagcgggataagagcgacgatgagcgtcagcaggctgatactcagcagcggccgggcccagcgctttacccgttgactgggctcaaggagcgtttcgccatcgctgagccagtggatccagtaactgccgttgtccaggcggcggacgccaaggtgcagaggctgattgatcgtcaggtggtcaaaaagcgaggggtcgttaaaatagcgtttatcggtataaaagacatggtcgccggcgataagacgcagatacccctgtttttcacaggcggcggtcgtgaagccagaaaagttaagggtgaaatagcgaacgcttttcacgggacaccctccatggtgttatcgcggctatccgtgccgcaatcaggcaggggatgaccctgcctgagacagaattacttctgcttagcgcgctcgaaagaggcaacgatttcggctttcgccgcttccgcgttgtcccaaccgtcgactttaacccacttgcctttttccagatctttgtagtgctcaaagaaatgagtgatctgggctttcagcagttccggcaggtcgttcacatcgttgatgtgatcgtattctttgctcagcttggtgtgcggtacggcaaccagtttcgcatcttcaccagattcgtcggtcatcttcagaacgccaaccggacggcagcggatcacggagcccggctgcagcgggtacggagtcgggaccagcacgtcaaccgggtcgccgtccagggacagggtgtggttgatgtagccgtagttgcacggatagaacattgccgtggacatgaaacggtcaacgaacagtgcaccgctctctttgtcgacttcgtatttgataggatctgcgttcgccgggatttcgatcacgacgtagatgtcttccggcagatctttgcccgcaggtacgttgagtaagctcatgtctgtttcctttaaaatgtatggcaaacaagtgctcggtattatagccaactcacatcgaaagtcttcgcttctttttcccgatatcgccgcagagtgctccgaatttttcgcgtaataatgacatgaaaatccataaacatagccacatcatgaataaatttatgtaaccgttttcattgcatttgattgatttatcatactgcttaaaaaaacgtcataaaccgcaacagccgcgctccctgcgaagccttatcggctctccgctgggcagtagggccatcattaacatctcatttacttttttgaagtgtgatgtaacgcattcagttacatcaccgattgtctatagtttgtccgcaggtgagactttaaccaacaataaccctacgaggatacccttatgtggaagcgcttacttcttgtcacagcagtttccgcagctatgtcgtctatggcgatagctgccccgctaaccgtaggtttttcgcaggtcggttctgaatccggctggcgtgcggcggaaaccagcgtcgcgaaagaggaggccgccaagcgcggtatcaccctgaagatcgctgatggtcagcaaaaacaggaaaaccagatcaaagcagtacgttcctttattgctcaaggggtcgacgcgatcttcattgcgccggtggtggctaccggctgggaaccggtgctgaaagaggcgaaagaggccaagatcccggttttcctcctcgaccgttccattgatgttaaagataaagatctctacatgaccaccgtgaccgccaacaacgtgctggaaggccagctgattggcgactggctggtgaaaaccgtcgacggtaagccgtgtaacgtcgttgaactgcagggcaccgttggggccagcgtggccatcgatcgtaagaaaggcttcgccgacgcgattgccaaagcgtcgaatatcaaaattatccgctcccagtccggcgacttcacccgcagtaaagggaaagaggtcatggagagctttatcaaagctgagaataacggcaaaaacatctgcatggtgttcgctcataacgacgatatggccatcggcgccatccaggccattaaagaagctggcctgaagccgggcaaagatattctgaccggctccatcgacggcgtgccggatatctataaagcgatgatcgctggtgaagccaacgccagcgtcgagctgacgccaaatatggccggcccggcgttcgatgcgctggagaaatacaaaaaagacggcaccctgccggagaagctgaccatcaccaaatcgacgctgtatctgccggatacggcgaaagaagagttagagaagaagaaaaatatgggctactgagtggggagcccctcattccatccctctccccggtgggagagggtaaaaagcagcgttccagaaaccccgggaagcccagcgcgacccggggtaacctgacatcatttgaaggtgacatcgattatgagcgccgaggcacaccaggagatccttcgcaccgaaggacttagtaaattcttccccggcgttaaggcgctggataacgtcaactttagcctgcggcgcggcgaaatcatggccctgttgggcgaaaacggcgccggaaaatcgacgctgatcaaagcgctgaccggcgtttaccatgccgatcgcggcactatctggctggaaggccaggctatttcgcccaaaaataccgcccatgcccagcagctggggatcggcaccgtctaccaggaagtgaacctgctgcccaatatgtcggtggcggataacctgttcatcggccgtgagccgcggcggtttggtctgctgcgacgtaaagagatggaggccagggcgacggcgctgatggcctcctacgggttttccctcgacgtgcgcgagccgctgaaccgcttttcggtggcgatgcagcagatcgtcgctatctgtcgggccatcgacctgtcggccaaagtgctgatcctcgacgagcccaccgccagcctcgatacccaggaggtggagatgctgttcaccctgatgcgccagctcagggataacggcgtcagcctgatcttcgtcacccattttctcgaccaggtctatgcggtcagcgaccgcatcaccgtgctgcgtaacggcacatttgtgggctgccgtgagacccgcgagctgccgcagattgagctggtgaaaatgatgctgggtcgcgaactggaccataatgccctgcagcgggcgggccgtaccctgctgagcgataaaccggtagcggcgtttgaaggctacggtaaaaaaggaaccatcgccccgttcgacctgcaggtccgcccgggagaaattgtaggcctcgccggcctgctgggttccggacgcacggaaaccgccgaggtgatcttcggcattaaaacggcggacagcgggaaggcgtggatcaaaggcaaacctcagaccctgcgctccccgcatcaggcttcctgcctcgggatcggcttctgtcctgaagatcgcaaaaccgacggcattatcgccgccgcttcggtgcgggaaaatatcgttctggccctgcaggcgcagcgcggctggctgcggccgatcccccggcgtgaacagaacgagatcgccgagcgctttattcgccagctggggatccgtaccccgagcgccgagcagccgatcgagtttctctccggcggcaaccagcagaaggtgctgctctcccgctggctgctgaccaaaccgcagttcctgatcctcgatgagccgacccgcggcatcgacgtcggcgcccatgcggaaattattcgcctgattgaaaccctctgcgccgatggcctggcgctgctggttatctcttctgaactggaggaactggtgggttacgccgatcgggtcattatcctgcgcgatcgccgacaagtggcggagatcccgctcgccgagctctctgttccggcgatcatgaacgctattgcggcataaggagtaacccatgatgcctcgatctctttcgcaaaccggcccggagaagcgacacttcacctggccgaagggcaccccgcagattattgccctgctgctggttctgctggtagacagcctggtggcgccccatttttatcaggtggtgctccaggatggccgcctgtttggcagcccgatcgatattctcaaccgcgccgcgccggtggcgctgctggcgattggcatgacgctggtgatcgccaccggcggcatcgacctgtcggtaggggcggtgatggcgattgccggcgcgacggccgcctcgatgaccgtcgccgggcacagcctgccggtggtgctgttggccgcgctggccgcgggcgcgctggccggattgtggaacggcatcctcgtggcggtccttaagatccagccctttgtggcgacgctgatcctgatggtggccgggcgcggggtggcgcagttgatcaccgccgggcagatcgtcacctttgattccccggccctggcgtggctcggcagcggatcgtttctgctgtttccgacgccggtgatcgtcgccgccgctacgctgctgctgttctggctgtttacccgtaaaacggcgctgggcatgtttattgaggcggtagggatcaacatccgcgcggcgaaaaacgccggcgtcaatacccgcatcgtggtgatgctggcctatgtcctgagcggcgtctgcgcggcgatcgccgggatcatcgtggcggcggacattcgcggcgcggatgccaataacgccgggctatggcttgagctggacgccattctggcggtggtcatcggcggcgcctcgctgatgggcgggcgctttaacctgctgctctcggtggtgggggcgctgattatccagggaatgaacaccgggattttgctctccggcttcccgccggagctcaaccaggtggtgaaagcggtggtggtgctgtgcgtactgattgtccagtcgccgcgctttatcggtttactgaaaggggtacgcggccatgataaaacgtaatttaccattgatgatcacccttgcggtgtttgtgctgggctacctctactgcctgacccagttccccggttttgcctcaacgcgggtgatctgcaatatcctgacggataacgccttcctcgggatcatcgccgtgggcatgaccttcgtgatcctctccggcgggatcgatctgtcggtggggtcggtgatcgcctttaccggcgtcttcctcgccaaagcgattggcttttggggaatctcgccgctggtggcctttccgctggtgctggtgatgggctgcgccttcggcgcgtttatggggctgctgattgacgccctgaagatcccggcctttatcatcaccctcgccggcatgttcttcctgcgcggcgtgagctatctggtgtcagaggagtcgattccgattaaccatccggtgtacgacaccctgtccgggctggcatggaccattcccggcggcggtcgtctcagcgccatgggactgctgatgctgctggtggtggtggccggtatttttgtcgcccatcgcacccgctttggcaaccaggtgtatgccatcggcggcaacgccacgtcggcgaatctgatggggatttcgactcgcagcgccacgatccgtatctatatgctctccaccggactggcgacgctggccgggatcgtcttttccatttatacccaggcgggctatgcgctggcgggcgtcggcgtcgagctggatgcgattgcctcggtggtgatcggcggtacgctgctaagcggtggcgtcggtaccgtgctgggaacgctgttcggggtggcgatccaggggctgattcagacctacatcaacttcgatggcaccctcagctcatggtggacgaaaatcgccatcggcattttgctgtttatctttatcgcgctgcagcgtgggctgaccgtgctgtgggaaaatcggcagaatgcggcggtgacgcgggtgagcggggcggggagtcgctaagaaatgctcctcccgcaggcgcgggaggagcgggcagggcgcttaggcgtccgggaacgctttaataaagttctcgacgtcttctaccatgtggttgttgccgacgaagaaggagcgacgctgatgcaggctttccgggataatatccagaatacgctctttaccgtcgctggccttaccgcccgcctgttcggcgaggaaggccatcgggttgcattcatacagcaggcgcagcttgccttccgggtggctggcggtgctcggatagagatagatgccgcctttcagcaggttgcggtggaagtccgccaccagcgagccgatatagcgtgaggtataaggacgctgagtcgctttgtcctcttcctgacagtacttaatgtacttcttcacgccctgcgggaatttgatgtagttgccttcgttgatggagtaggtattgcccttctccgggaagcgcatacgctcctggcatagacagaagacgccaagggacgggtcgtaggtgaaggcgtgaacaccgcagccggtggtatacaccagcatcgtcgacgatccgtagaccacatagcccgcggccacctgcttgttgcccggctgcaggaagtcttcttctgtcaccggcgtgccgacaggcgtcacgcggcggtagatagagaagatcgtaccgacagagacgttaacgtcgatgttagaggagccatccagagggtccatcagcaccacgtatttggcgtgttcacacccttcgaagacgacaatctcatcttcttcttcagaggcaatcccggcaacaatatcgcgtgctcgcagtgcggcttttaatttttcattagcgaacagatcgagtttttgctgaacctcgccctgaacgttttcagcaccgctggcacccaggatatcgaccagaccggccttgttgatatcgcggtggatgatcttggcgcccaactttattgctgacaacaaagcagtcagctcaccggtggcgtgggagaactcgtgctgcttttcaacaataaactcacctaacgttttcataactcgttccctgcatttttatgttgagtaaaacgaacgcaacaatcttaacaaagaatcaaaaaagtgcgcacaggtgaatcgcgccagcaaaatacagattcgcctgaaatgcatttcgccagggcccgggatatgggtaaaatgtgccccggataagaaaaggaaatgacgaatgcgcattcatattttaggaatctgtggcacgtttatgggggggctggccatgctggcgcgctccctcggtcatgaggtaacggggtcggatgctaacgtctatccgccgatgagcaccctgctggaaaaccaggggattgatttaattcagggctatgaccccagccagctggagccccggccggacctggtgatcatcggtaacgccatgactcgcggcaacccgtgcgttgaagcggtgctggaaaataatattccctatatgtccggcccgcagtggctgcacgacttcgtgctgcgcgatcgctgggtgctggccgtcgccgggacccacggcaaaaccaccactgccggcatggcgacctggatccttgaagcctgcggctataaaccggggttcgtgattggcggcgttccgggcaatttcgacgtctccgcgcgcctgggcgacagcccgttcttcgtcattgaagccgacgaatatgactgcgccttcttcgacaagcgctccaagtttgttcactactgcccgcggacgctgatcctcaacaaccttgagttcgaccacgcggacatctttgatgacctgaaggcgattcagaaacaattccaccatctggtgcgcatcgtgccgggcaaaggcaaaattatcctgccggagaacgacatcaacctgaagcaggtgatggcgatgggctgctggagcgagcaggagctggtgggcgagcagggccactggcaggcgaaaaaactgaacgccgacgcctcgcagtgggaagtcttactcgacggtgaaaaggtcggcgaagtgaagtgggcgctggtcggcgagcataatatgcataacggcctgatggcgattgccgcggcgcgtcacgtcggcgtgctgccggcggatgccgcgaacgcgctgggcagctttatcaacgcccgccgtcgcctggagctgcggggcgaagccaacggcgtcaccgtgtatgacgatttcgcccatcatccgacggcaatcctcgccacgctgcaggcgctgcgcggtaaagtaggcggtaccgcgcgcattctcgccgtgctggagccgcgctctaacaccatgaaaatgggcgtctgcaaggacgatctggcgccgtctctcggccgcgccgatgaggtgttcctcctgcagccgcagcatattccgtggcaggtggcggaagtggcggaagcctgcgtccagccggcccactggagcgccgacgtcgataccctagcggagatggtggtcaaaaccgcccacccgggcgaccatatcctggtgatgagcaacggcggcttcggcggcattcatcagaagctgctggataagctggcgcaaaaagcggccgcggctgaataagcgcgtacgcctccggtcactgccctccgcgtgagggcagttttgttttagctaccaggaattgtgtgatgctgacctgcgaaagcgtacgttctactgactcgccccatttcgccatgctggacgcgctttacgcgcgcgcctttccgtggcacgagcagcgcgaaagcgaggccaaacgtcaggcgctgagccacccgcgctacgcgctggaagcatggttcgatgaaggcgtctttgtcggcctcagcggctgctggcagtttgccggctacggttatatcgaacatctggcgatcgacgacacgctgcgctcccgcggctatggtaaacagctgctggcgcagatcctgacgcgcgccccgctgaccattctggaaatcgatccgctaaccacggccatcgcccataaacggctgcgcttttatcagtcgatggggttccatgctaatccctgggcgcatcatcacccgagctatcatcagggcattgcggatcatgagctgctggtgctgagctacccgcagccgatcgatgagcggcagtatcagcagtttgcccgggatctcgggcacgaggtgatggggcgggagtagcccggctcggcgtaccgctccgggcattcgactggcggcgctgttactctttggcgatcggcgtctcgttctccgcgactttgttatcgccctgaatcttagcgattttctgctcaacggcggctacctgggcgctgtcgtgcagcagggtgtaggttagatcaaactgcgcgctggcgcccggctgcagctgcttcacgcgtttttgctcgcgttcaatggtcaccggataggcgtagctggtccccggctcgataccggtgacatagccctgcttgacggtatcggtgtttttccacagcgtcaggaccggcagctgacgggtatcaaactgaatagaggcccctttatcgcccgctttgttgaccacggcggccagggtctggtgattttcatcggccagcggctgaatattaaataccatctcgtcaaaatctttggtcggtccctgataggtctgccaggtttttaacccgctcttcgcgtaatcattgaacgggctgatgctggacatcggggcgaggaaacgcgcgccttcttcgaggatcggggtgccgaagttgctgtggtagatgatctgataatcatgcggatagtcggcatggttggttaagacgtcatgtaagctgaagctgttgctgcccggcacgtagcgcagttcggtcagggtctgcagatcggcttttttaaaggtgctctctttcaccagcccgcggatgcggatttcatacggcgcgctgtcggccacctccacctccaccagagaggccggcgtgttgcccgccttgccgtgtagggtataaatttgcccgtccgcggtcaccggatggccggtccattcatagccgcagcggaccatcatctcgttgaatccttccagccagccgaggccattgcggctttctaggttgataaacgccgggttgacgacctctttaaccggcgaatcccagcccatccggctgccgaaaccctcaatacgcagcaagttcatgccgcgtgtcgggctcagggtgatggtcaggccgtctttactgtgaatggtgaggattttgctgccttcctgcttaccgccgtgcaggactttttgctcaatgctgaacgcatggtctttcaccttcagctgatcgctgttgatctgccagtttcctttatccatcccctcttcagcgttcgtcagcacccatgtttttgccgcggccgagccggaaaccagcagggcgatcgtcgtcagaaccaatgtctttttcatttttattccctttttgctgaatcgattgtgtcattgacgtgtgaaatctaccggcatgggggtgattaaaatgtgaagcgcctcacctggtgagaaagtggccgtttttatgatgttaaatgagatgaaagtcgtattattttgctaagtaatacgtatttatcaccaggatatgtgatctatattgtttttagctttaacgattcagcttggcggtaaggcaataaacaaacgtatcgtcgtgtggatgaggggactcaggcgatgcgacgggaatccccctgctggcgcaagccttagagctggggtgaaggtaggccggataaggcgtagccgccatccggcacaacgacgggaacggggtctggtacagcttgcccggcggcgctgcgcttgcgcgggcctacggtgttgagtaactgtttgatatacagggctccgtaggccggataaggcgtagccgccatccggcacaatgacgggaacggggtccggtacagcttgcccggcggcgctgcgcttgcgcgggcctacggtgttgcgtaaccgtttgatatagggaaccgtagcccggataaggcgcagcgcgccgccatccgggagactattgcgggcaaaaacagggggacttagccttcgttttccgccagttcacgcagatactggaagatcaggcgcgccgatttcggcggcttgttgccttctttctctttcttcgcattgcggatcagcgaacgcagctgctgacggtcagcatctggccacaggttcagcacttcagcgacggcgtcatccccgtcgtcaatcagtcgatcgcggatctgctccagcttgtggaacagcgcaacctgctggttgtgacggtttttcagcttgtccagcgcctgacgaatcggatcgacatcgcggttgcgcagcatcttgccgataagctgtagctggcggcggcgaccctcttttttgattcgctgggcgagttcgatggcgtcgcgcaggtcggtatccagcggaattttatccagcgcgtttttccccaggtcaacgagttccgcgccaagacgcttcagttcttccgcgtcgcgcttaatttcactcttactgacccagatgatttcatcatcttcatcttcaacgtcatcaccgggcacgtcgtcgagccagtcttcgggctgctttgtcatctcaggctccttaaaaaaagaggctaatgttaccagttaaggcgcgcactgaaaaacggttctctgttagacttcagttaactccttcttacattatggcattagcaatgaaagtcatctctcaagttgcacagcagcgtaagacgctggaagaagccgttaccacggcactggaactggcggcaggtaaatctgacggtgcggaagtttccgtcagcaaaaccacgggcatcggcgtcagcacccgctatggcgaagtggagaatgtagaattcaacagcgatggggcattaggcatcacggtttaccatcagaaccgcaagggcagtgcctcctccaccgatcttagcccggacgctatcgcccgcaccgtgcaggcggcgctggatatcgctcgctatacctccccggacccgtttgccggcgtagccgataaagatctgctggcctttgacgccccggatctggacctgttccacccggcggaggtctccccggacgacgccatcgaactggccgcccgcgcggagcaagcggccctgaaagccgataaacgcatcaccaacaccgaaggcggcagctttaacagccactacggcatcaaagtgttcggcaacagccatggcatgctgcaaagttactgctcgactcgccactccctctccagctgcgtcattgcggaagatgacggcgatatggagcgcgactacgcctacaccattggccgggcgatcgaggatctgcagtccccggaatgggtcggggaagagtgcgcccgccgcaccctgtcacgcctggcgccgcgtaagctgtcgaccatgaaggcgccggttattttcgccaacgaagtggcgaccgggttgtttggccacctggtcggagcgattgccggcggcgcggtctaccgtaaatcgaccttcctgctcgattcgctgggcaaacaaattttgccggagtggctgaccattgaagagcatccgcacctgctgaaagggctggcctccacgccgttcgacagcgaaggcgtgcgcaccgaacgtcgcgatatcgtcaaagacggcgtgctgacccagtggctgctgaccaattactcagcgcgcaagctggggatgaaaagcaccggccacgccgggggcatccacaactggcgcattaacggccgcggcctgagttttgcaaagatgcttaaagagatgggcaccggtcttgtggttaccgaactgatggggcagggtgtcagtggcgtcaccggcgactactcacgcggcgcatccggcttctgggtagaaaacggcgaaattcaatatcctgtcagtgagatcaccattgcaggaaatctgaaagaaatgtggcgtaatatcgtgaccattggcgatgatattgaaacgcgcagcaacattcagtgcggttctgtgctgctgccggagatgaaaatcgccgggcaataacacctgtttgcttaaataataaaaaggaagtgagcaatgcgtaaaaaactgttagcgatgctggctgtctctgcttttgcgctcggttcagcgtcggccttcgccgacctgggcgaagacatggacactctggcagaaaacctgcaagtggtacagaagacctccgacgccggcgagctgaaagcggcgctgaataagatgcgtaccgccgcggtcgatgctcagaaagagaccccgccgaagctggaaggcaaagcggccgacagcgctgagatgaaagattaccgtcacggtctggatattctgatcggccagatcgacggtgcgctgaagctggcgaacgaaggcaaggtgaaagaggcgcaggccgccgcggaggagtttaaaaccacccgcaatacctatcataagaagtaccgctaaccgttcttttcgggaggcatcagccgatgcctcccacctgaaagcctaccgatatcacatttttcccttttctttttccggtctttctgcggtcgttttccgctaaacctcgatcattgttgtgatgcgcatcacgtcatatcgcctgtttttacatttatccggcgaatatgtggagtcgatcacctaagccttctccctttccacttcgaagtggaaaacaactcgctacaaactcctgacccccggcgctactttggattccagagacatcagcggggtaacacaagtgaataacggagcggtaataaacgacgtaggggagcaggcggcgcagaccgaacgcctggctgacaagatgttacagcaggtattcgccctgttaagccgtcacgacatcgtccctaacgacgttcaggagcaaatgctgacttcccacgtgcgggccatggcccaccggtcaatcagcggcgaaccgctaccggaagtggatgccagtctgttcgaagaaatttctgaagattcaatgatgctggcccgcgaagtggtcgcacagttcggcaacctgcctgatgaagaggcctggctgctctccgtccacttcgaagtcgcgaaagataacctgtaaggagcaaaacatggaacaaatcaccgtagtcattggcgaccgtctgggtaaaggccaaaaagtcgccgcaggcgctgaaaaagcgggcgcacgtgctgtggtcgtccctggcgttgcggccgacatgaagcttggcgacataatgaaagcggaaaacgccaccttcggcatctccttctgcggcagcggcggcgccggcgccatcaccgcccagaccaaatacggctacaaagcaaaatatggcatgcgctctattgatgagggcgtcaccgctatcaacgaaggctgcaacgtgctgggcttcggctttatggataaagaagagctgggcgagcggctggtcgaagcctggaaaaagaaatacggcgcataagtatgaaagagcaattcaccaccacggtgagggttgccggcaaaggcgaaagcaaatcacgggccttcgccgatgccctgaaccatgtgcaggctgcggtgatgaaatcatcctcgcgcatcctactgcgtattgagccacaggacgtgacggttgttcatgcgcgcgaagcggtacgaaaagaggcgtttctgttcttctttttgcgccgtgaacgacggacctacagcgtggagctggacgtcaccgtcaacgtgaccgccatcgatctcgataaagtggatttcgtcacgcaaacctgattgttagcaaaaggtctgactatgttcctgataattttaataaaatcgcttatcatcggcggcctggtcggcgtcggcgtgggcgccggagcggcacgcatgtttcatgcccccaccacgcaggggatgggggcgtttcgaaccctgggcgagctgaattcctgtgagggcgatccggcctcccacttctcctttggccttggcttcttctttaacgcctgggcctcttccgttgcagcaggctccttcacccaggatgttgaccaccgcattatccccaactggggcgcggcggcgctgatgctgaaaaatcgtaacgtcggcgaaacgctgcacgatccgaaaaaaatggccatctcctgcggcatcatcggcatgatcgtcgtcgccttcctcaacctgaccgcctcgtccgtaccggaagcgctgcaggtgaccgccgttaaggtactggtgccggcggcaaacctgctggtgaacaccgtgatgccggtgatcttctggctggcggcgatcgatgccggtaaaaaatcaggcttctgggcgacgattttcggcggcgccgcgcagctgattatgggtaacgccgtaccgggtctggtgctggggatcctgatcggtaaaggcgtcgaagagagcggctggaaccgggtgactaaagtgatgatggtggccatcgtcgcgctgtttgtcctcagcggcttcttccgtggcttcgacatgaagatgatcgaatccttccatctgaccgtgccgaactggctggacatgatccacaactcactcagcggcaagtaacgggagccggataatggaacagaataaaggtttttggtatgccgactggtcgttcccgatctttgttggcctgctctcctccggcgtcttcgccgggacccacatgtactacctgtacggcatcggcgcctttaacgaagtggccttcgtggcgatgctgaagtcggggattgataccggcgtttacggcgcggtggcggcgtttggcgctagcttccttttcgcccgcatcatcgaagggtcgctggtagggatcctcgatatcggcggcgcgatacagaccggtatcggtcttggcgtgccggcgctgctgctcggcgcgggctttgtcttcccggtggcgaacttcgccgcgtcgctggtcaccggtctggtcctcggcctggcggtgggctacatcatcattctggcgcgtaagttcaccatcaaccagagcgattccacctacggcgccgacgtgatgatgggggccggtaacgcctccggccgcttccttggtcccttgatcatcctcagcgcaatgaccgcctcgattcctatcgggattggctcgctggttggcgcactgctgttctacatctggcagaaaccgatcaccggcggcgccatcctcggggcgatgatcctcggttccatcttcccggtggcgattagctaagcgcccgatggcgctgcgcttatcgggcctacaagccagcgcggtttgtaggccggataaggcggtacgccgccatccgtacactcttttcatcaggagatagctatgtttgatttactcctgcgccgcgcgcgcctcgtcgacgataccctgactgatatcgccattcaggacgggaaaatcgcggcgctgggcgagattagcgcgccctcccgtaaaaccattgagctgaacggcaaggtttacgtcagcgctggctggattgactctcacgttcactgctacccgaattcaccgatttatcacgatgagccggatagcgtcggcatcgccaccggcgtcaccaccgtgatcgatgccggcagcaccggcgccgacgacgtcgatgacttctatcaactgacccgtaaagcggcgacggaagtttatgcgctgctcaacatctcccgcgtcgggctgattgcgcagaatgagctggccaatatggccaatatcgacgccgccgcggtgaagcaggcggtgcagcgtcatcccgactttatcgtcggcctgaaggcgcggatgagcagcagcgtggtgggcgaaaacggcattacgccgctggcgcgcgccaaggccattcagcaggaaaacgacgatctgccgctgatggtgcacatcggcaataacccgccgaacctcgatgaaatcgccgatctgctgagcagcggcgacatcattacccactgctataacggcaagccgaaccgcattctgaatcctgccggcgagctgcgcagctctattactcgcgctctgcagcgcggcgtgcgtctcgatgtcggccatggcaccgccagcttcagctttgaggtggcgcggcgggcgattgcgctgggcattctgccgcacaccattagctccgatatttactgccgcaaccggatcgacggcccggtgcgctcgctggcgctggtgatgtcgaaattcctcgccatcggcatgacgctgccgcaggtgattgactgcgtgaccgtcagcgccgccgaagggctgcgcctgtcgcgtaaagggcggctggaagtgggcttcgacgccgatttaacgctatttcgcctggagcaccggcccacgctgctggtggatgccgaaaaagagagcctgcaggctgacaacattctggtgccgctggccgcgatccgcgcgggcaaaggctatctgaccgaacaagggagcgcggaacatgccttcgatttttgagaaataccatttaaaacaggtgattaatacttctggccgcatgacggcgctgggcgtttccacaccgcgcccggaagtggttgaagccgcgatggccggtatgaaccagtactttgaaatgaaagacctggtgaataaaaccggcgagtacatcgccaaactgttggatgtggaaggggcgaccgtggtctcctgcgcatcggcggggattgcccagtcggtagcggcggtgctggtgaaagacagcgactggctgctggagaacctgcacgttacgccgattgaaaataacgaaatcgtgttgccgaagggccacaacgtcaacttcggcgcgccggttggcaccatggtggcgttgggcggcggtaagctggtggaagcgggctacgccaacgaatgttctgcccaacagctggcggcggcgatcactccgcgcaccgcggcgattctgtacatcaaatcccaccactgcgtgcagaaaagcatgctcaacgtcgcgcaggccgcggaagtggcgcgccagcataacgtaccgctgatcgtcgatgcggcggcggaagaagatctgcagtgctactaccgcatgggcgccgacctggttatctacagcggcgcgaaagcgattgaagggccgaccagcgggctggtgatcggcaaaacgcagtacgtcgaatgggttaagcgccagtcgatggggattggccgggcgatgaaagtgggtaaagagggcattctcggcctgacctgcgccattgaacactacctgacggcgagcaaagagagcggcgagcagatggtggcgaagatgacgccgtttatcgaacagctcaacgcgcttaacggcgtgaccgcgcgggtggtgtgggacagtgcgggccgtgatatcgcccgcgccgaaattaaatttgatgaagtcacgaccggcgtgaataccggcgatctggttaacgcgctgaagcagggtgaatacgccatctacttccgcggctataaagcgaatgaaggcattatcgaagccgatgtccgcagcgtaaacgcccagcagctggaggtggtcgctcgccgcatcgcagaagttctgaataaggagaaacaagcatgaaactgaccccaaacttttaccgtgaccgcgtgtgcctgaacgtcctggcgggcagcaaagacaacgcccgtgaaacttacgacgcggcggaaggtcacgtcctggtcggcgtgctctccaaaaactatccggacgtcgccagcgcggtggccgatatgcgcgactacgcgaagctgattgataacgcgctctccgtcgggctgggggcaggcgatccaaaccagtcggcgatggtgagcgagatttctcgccaggtgcagccgcagcacgtcaaccaggtcttcaccggcgtggctaccagccgcgcgctgctcgggcagaacgagacggtggtcaacggcctggtctctcccaccggtacgccgggaatggttaagatctccaccggcccgctgagcagcggcgcggcggatggcattgtgccgctggaaaccgccatcgcgctgctgaaagacatgggcggcagctccatcaaatacttcccgatgggcggcctgaagcaccgcgccgagtttgaagccgtcgccaaagcctgcgccgcgcacgatttctggctcgagccgaccggcggtatcgatctggaaaactacagcgagatcctgaaaatcgccctcgatgccggggtaagcaaaatcatcccgcatatttacagctcgattatcgataaagccagcggcaacacccgcccggccgatgttcgccagctgctggagatgaccaaacagttagttaagtagtgcccttgtccctcaacctcaaagggtgaggagcagcttatcccactgaaccatcaaggagttgctatgcctgtcgctcgtcatctgcttgtcgcttcactgtccctgtttgccgccgccgcgggcgccgcgcaaacccactatgcctgggtaggcacctataaccccaatggcgaaggtctgtatcgctttaccgtcgatgccaaaaccggcgccctgcgcgataagacgctggtgagctcgttgccgaacgtcgcgcaattaaccgtgtcgcgcgatggcaaaacgctgtatgccgccagtgaggtcgaaaaaggcgtggtgcaggcgtggcgcattgaaaagaacggcgagctgaccgcgctcagccaggtcgcctccggcggcgccgggccggtgtatctctccctgacgccggacggtaagcatctgctggtggctaactatgtcagcggcagtatcgccgtgctaccggtgcaagaagatggtagcctggctgaggcggtggacaggcatcaggatgaaggcccggcaggcgccgaacgcccggcggcggccgtcgagggcagcttcgccatcagcgatcacaacggcccgcatgcccatatgatcgccgccgatcccagcgggaaatacgtttactctaccgatctggggctggatcggatctatcagtatcggctggatagcgccagcggcaagctaacgccgaacgatccgccgtttatcgccgcctcgtcgccgggggccggcccgcgccacttcgtctttacgccacagggcgacggcctgtggctgattaatgaggaagcgtcgacgctgaccttctatcatctggataagcaaagcggcctgctgcgtgaaggcaaaactgtctccgcgctgccggaagggtataaaggcaccagctttgccgccggacttgtgttgagcaacgatggcaaacagctatacgtcgccaaccgcctgcataacagcattgcccacttcacggtgctggccgacggcagcctgagtcaccaggaagatatctggacgcgtggcgattatccccgcaccctgacgctggataatcaggggcagtggctgtacgtcatgaaccagcgtagcgataatattacccgcttcagcgtggcgccgaaggatggcaaattaacctttgcctccgactatacgccggtcggtagcccatcgcagatggtgatatccgcccaaccctgagccgtaattacaaggaactgacatgcgatttcccaaccaacgcttagcgcaactcttcaccctgctgcgaaatgaaacgctgccgcaggatgagctggcgcaacgcctgtcggtttccacccgtaccgtgcgcgccgatattaccgccctgaatacgctgctggtgcaatatggcgcgcagtttatccttaaccgcggcagcggttatcagctgaagatagataatccgacgagtttccaggcgctggaggagaccgcgccgaaggcgcagcacgtgccgcgtaccgcccaggatcgcatcacgtttctgctggtgcgtttcctgacctcggcgttctctatcaagctggaagacctggcggatgagtggttcgtcagccgcgccacgttgcaaaatgacatggttgaggtgcgcgagcgcttccagcgctatcagctgactcttgaaacccgcccgcgccacggtatgaagctgttcggcagcgaggtgtcaattcgcgcctgcctgaccgacctgctgtgggagctgacccagcaaggcgatatcgcgccgccgatcggcgccgaggcctttgcggcggaggtgccagcgctgctggagccggtgctgcaggagacgctcacgcggcatcatattcgcctcaccgacgccggcgagcgctttgtctgcctgtatggcgcggtggtggtgcgccgcgtcagcgaaggctacccgctggccgatttcagcgctgaagatgtggcgcagaacgtccgcgacgccgcgcgcgagctgacgggtgagctgcagcggctggccgggaaacctttatcgcccgccgaagaagagtggctatgcgtgcatatcgcggcccgtcaggtgcaggatgtcgatccggaaactatcagcgccgacgatgatgaagcgctggtcaattacatcctgcgctacatcaacagccagtataactacaacctgctggacgacgcccagctgcatgccgatctgctgacccacattaaaaccatgatcacccgggtgcgctaccagatcatgatccccaatccgctgctggataacatcaaacagcactacccgatggcctgggatatgaccctggctgcggtctccagttgggggaaatatactccgtacaccatcagcgaaaacgaaatcggctttctggtgctgcatatcggcgttgggctggagcgccactacaacatcggctaccagcgtcagccgcaggtgctgctggtgtgcgataccagcaatgcgatggtacggatgatcgaggcgatcctgcagcgtaaatatccgcagctggagatcgccgctaccatctcccagcgcgagtacgaacagcgggacgcgatcgaggcggatttcgttatctcaacggtgcggatcggcgaaaaagacaagccggtggtgaccatcgcgccgttccccaccgactatcagctggatcaaatcggcaagctggtgctggtggaccgtacccgtccgtggatgctgaataagtacttcgatgccgcccacttccgggtggtcgataaaccgatggatcagcaaacgctgttcgccgagctgtgccagcagctgctggaggaaggctttgtcgatgcggagtttcatgcttcggtggtggaacgtgaagcgatcgtcagcaccatgttaggggatggcattgcgctgccgcactccctggggctgctggcgaaaaagacggtggtttataccgttatcgccccgcagggcatcgcctggggcgacgaaaccgcccatctcattttcctgctcgctatcagcaagcgcgagtatgaagaggcgatggcgatctacgatattttcgtgactttcctgcgcgagcgcgccatgagtcgcctcgccgcgacccgcagcttcgatgagtttaaaacggtggcgatggagtgcgtcagccggttttgagaggcgttttccagattcgagtgtaattcaattgtaatgctatactgcattacaaaattccactttccggaggcataatggccacgctcaatgttcgactggacgataaactcaaaaaagaggcttatgccgtgctggagaaactcgatatgacaccaacggaggcggtacgcctgctgtttcaatacattgcggaaaatggccgcatgccggtgaaaagtatgaccatcagtgatggcgaagcggcgttattacgcaccgttcgcgaacggctggaaaacccacggccgggggttaaggtgagtctggatgacctatgaactggagtttgatccacgagcctggcgcgaatggcagaagcctggcgagacggtcaaaaaacagttcaaaaataagctccagcagattgtgcagaatccgcgaattgagtcggccaggctgagcgatttaccggattgctacaaaatcaagcttaaggcgtcaggttatcggttggtgtatcaagtacgagatagtgtggtggtggtttacgttattgccattggcaaaagagagaaagcggccgtttatcatcaggcgaataaacggctctaaacgctatcgcaaatgatgtacgacctggttgctgctgccgcgccagataagcgccggatctttcaaatcctgcacaaacttaccgtcaaccagcacgttaatcaggttcaccacctgcatttgcgcctcattcagctcatcaagtttatagccggtccagacccagatatctttgccggggcattcggcgcgtacgcgctgaaccagctttaaaatatccgcgacgttctgcggatgcagcggatcgccgccggagagcgaaagcccctggcgtttgatgcgggtgtcgttgaggtcggcgatgatacggtcggccatctcagcggtaaacggcataccggagttcacccgccaggtgcttttgttgtagcagccggggcactcgtggacgcagccggagacaaacagggtgcagcgggtgccggggccgttgacgatgtcgacggggtagtactggtgataattcattttcacttctcaattaacgccagagcggcgttggctgcgctcactcaccccagtcacgtactgaatgtacgctcccggggattccttcgtttgccgccttgctctgacgttaattgctttgcgaaaacgaaggagtgcggccatttcctggcgtcgctgcgctcggccgagctacaacagtggtagtggtagcccggataaggcgctgcgcgccgcgatccgggaacggctccttagtggccaaacggctacggggccggtcccttctccccgttggggagagggggaggggctaaaccagctggaattaaccaatctgcccattgcccaggtgcttcacgcggcgcttcacctcttcctgcttgccggcgttgaacggccgcgcgtccgggctgccgagataaccgcacacccggcgggtaacggaaacgcgggcggcgtcgtggttaccgcatttcgggcaggtaaagcccttgctggtgcactcgaactcgccggtaaaaccgcactcgtagcactcatcgatcggcgtattggtcccgtagtacggcacgtgctgatagctgtaatcccacacgtcttccagcgccttgaggttatgctggatattcgggtactcgccgtagcaaatgaaccccccgttggccagcggcgggtacggcgcttcgaaatcgatcttgtcgtacgggttgaccttcttctccacgtcgaggtggaagctgttggtgtagtaacctttgtcggttaccccttccaccacgccaaactcggcggtgtcgagacggcagaagcgatcgcacaggttttcgctcggcgtgctgtacaggctaaagccgtagccggtttcttccttccacaaatcgacggcgtcgcgcaggcgctggacgatggccacgcctttctcacgcaacgcctcgctgtcgtacatatgctggttgccgtacagcgcattgatggtttcatggataccgatatagcccagagaaatggacgcgcggccgtttttgaagatctcggagacgtcgtcgtcggctttcagccgcacgccgcaggcgccttccatatacaggatcggcgccacgcgagccttcactccttccaggcgggcgatacgggtcatcagcgctttgcgcgccagctgcaggcgctcgtccagcagcgcccagaaggcggcttcatcgcctttcgcttccagggcgatgcgcggcaggttgagactgatcacgccgaggttattgcgtccatcatgcacctgctcgccgttctcgttttcccataccccgaggaagctgcggcagcccatcggcgttttaaacgacccggtgactttcaccacctgatcgtagttgaggatatccgggtacatgcgcttgctggcgcactccagcgccagctgtttgatgtcgtagttcgggtcaccgaacttatggttcaggccgtcgcggatcgcgaacaccagtttcgggaacaccgcggttttgcgatttttaccgaggccggcaatgcggttgcgcagaatcgactgctggatcagccgcgattcccagctggtgccaaggccgaatccgaaggtgacgaacggcgtctggccgttggcggtatgcagtgtgttaacctcatactccagcgactggaaggcgtcgtagcactctttttcggtacgggcgcgggcatagccttcggcatccgggatctgccactcttcggcgattttgcgatgctttttgaagctttcgctgacgaacggcgccagcacttcatcgatgcggttgatggtggtgccgccgtaaatatggctggcgacctgggcgatgatctgcgccgtcaccgcggtggcggtagagatagacttcggcggctcgatctccgcgttgcccatcttaaagccctgggtcagcatgcctttcaggtcgatcagcatgcagttgaacatcgggaagaagggcgagtaatcgaggtcatgatagtggatcatgccgcgttcgtgagccatcaccacatcgtggggcagcaggtgctgccgggcgtagtgcttggcgacgatcccggccagcaggtcgcgctgggtcgggatgactttactgtccttgttggcgttttcgttgagcagcgcggagttggtctgctcgacgaggccgcggatctcctgattgagacggccgcgcttctcacgctggctatcgcggtcatggcgatactcaatgtaggcgcgcgccagctgcttataggggccggacatcagctggttttccaccgcggtctggatctcgttgatgtcgacctgggcgcggccctgcatttgttggctaacgacttctgcgacggtggcgcaatagtctgcgtcatcgactcccgctgctttagctgcacgcagaattgcttcctgaatgcgctctgagttgaacggcactttacagccatcacgtttcatcacatgcggtgtcatgatcactccatatatagaacaggttatccacagaggcggaggttatcccgaaggcgctgcacgctacggctcgtgctgtttaccttcgggtccggcccgttttatccacatctcatcaccgccagacatcgacaagatatggtgacataatagacgattaatacaacatgttgggccgaggcgcattttaagttctatatgtagtgatttgcatcaaagatgtttgcgattttattgacccagaacaaggtaaaaaggtgagagtacggatgatgggcgctggcgataaatgtaaatttaggcgcttaaaatataagcaaaaatcgagcccgttcacgcatgaaacgggcaaatattcaggcaatcaacgtatcgttaagcagatcgaccagcagtagcagggcatagcgagcctgctgcgggtcagcgggcagcggcaggatggcgctggccatatcgccaagggcgtgctgttccggcgtcagagcaataatggtcactccctgcgtacgcgcctgcaaagtggcgctttgcaacacagggttggcctcggcagtggccagcaccagcagcagatgatcgtcattgagggtgctggcggtcagccgcatcagcgctgcatcctgacagagattaatcgcgatgccggagggcagtagctgatgctggagcagcgcggccagcgtcacgtcctgggcgccaagggcgaagcagtgtaccgcacgggcgctcagcaggcgcgatttacacttttccaccgccgcttccgcggtatggccgagctgacgagttagggtaacgccaaggctgctaagtttgtcgcgccaggcgacgggcagggcggcgctgtccggcgtaagccagctggcgcgccgttcgctggcctgcgccagctgtttacgcagatcacgaatatcatcgcagcccaccgagcgggcgaagcgggtaatggtggcagggctgacccccgcgctggctgccagctcgtcaatagaggcgctggcggtaaagcttagattttgtagaataaaggtggcgacgcgcgactcctgggcactaaagcggcgcattccttcctgcagctgacctacgatatccatcctcatgttccctttggcaaaacccgcatttgaaaatatttttcaattatcgactgtctctctttatagcactcacgccgcatatttcctatggtcagagcagtaaagggtgacgccctggcgataaaaatgcgcaaaaattgagcctcgatcacatcggtgaaaattattttcatatagccttcactatcacacaatattaacaatatagtcgtccaggccctggggctgaagcgataacacgtaaaggggaagcgcaatgccacgaatcgtactctgttgtgccgcaggcatgtcgaccagcatgctggtgaacaaaatgaaagcagaagcccagcagcgtgcgctggcgctggaaatctatgcggtggcggtggcggaatttgaacgtgaattgccacacgccgacgtcatcctgcttgggccgcaggttaaatatgaagccgggcgcctggccgcgctggccgcgccgcagggcaaggcggtggcggtgatcgatatggctgactacggcatgatgcgcggcgccgcggtgttggataaagcgctagccctgctcgaacactaattttctcatcccgtttttcatcatcatcacgtgcggtcctggcgatcgcgcgcggcgctctgtatgccgaaaatccgaaaagaggacactatgcaagcactgaaaattgccgttatcggcggcggcagcagctacacgccggagcttattgaagggattatcgttcgttacgagcagcttccggttacagagctggcgctggtagatgtcgaatccggccgggaaaaggtggagatcatcgccgcgctgacccggcggatgctgaaacataaagggctggagcaggtggcggtcagcgtccactttacgctcgatgaggccatccgcggcgccagctttgtgctgacccagctgcgtgtcggacagctggcggcgcgcgccgccgatgagcggctgggtctcaagtaccacctgctgggccaggagaccaccggcgtcggcggttttgccaaggcgctgcggacgatcccggtgatccttgaggtggcgcgtaaagtggaacagctggcgccggaagcgttcattctcaactttactaatccggcggggatcgtcaccgaggcggtcagccgctacagcaaggcgaagatcatcggcctgtgcaacgtgccgatcaacatgcagcacatgatcgtcgggatgctgggcgcccaggagtccgaagtaaaactgcgctttgccgggctcaaccatatggtttgggtgcataaggtgctacaggggcgcgaggatgtcaccggcaaggtgatcgacatgctgtgcgacggtaaggcgctgtcgatgaacaacattaaagagctgccgtggccagcggaattcctgcgcgcgctgaaggcgattccgtgcccctatcatcgctatttttggctgacgccggcgatgctggcggaagagatcgccgcggcgaaaaccaagggcacccgcgccgaacaggtgatgaaagtcgagcaggagctgtttgcgctgtacgccgacccgcagctggaagaaaaaccggagcaactgagctttcgcggcggcgcctactactcggaggtggccgtcgagcttatcaacgcgatctacaacaacctgggcgcggagatggtggtgaatacccgcaacaacggcgcgattcatggtctggatgatgatgcggtggtggaaaccaacagcattattgatgcgcaaggggcgcggccgctggcgttcggcccgctgccgccggcgatgaacggcctgacccagcaggtgaaagccttcgagcggttgacgattgaagccgcggtacacggctgtcgcgaaagcgcactgctggcgctggtgaccaacccgctggtcggtaacgtcaccgatgcccaggcgctgctggatgaagtattaaccatcaaccgtcaatggctgacgcaatttaactgaccgctatttcccctcgggagcacaccatgtcgaatacaagctggattgaacgttacgtcatgccggcggcgctgagaatcgccgggcaaaagcacgtcctgtcggtgcgcgacggcatcattctcaatatgccgtttatgttgattggctcattcttcctgattttcgcctacctgccgatccccggctatgccgatatgatgagcagcctgtttggcgaggtctggcgcgataaaatgttgtacccggtgaaagcgacctacgacatcatggcgctgatttccagcttcggcatcgcctaccggctggcggagaagtatcgcactctcgatccgctgagcgctggggcgatgtcgctggtggccttcatgatgacgatcccgcagaacacgctgtttacgccggtacacggcgcggcggaggtgattaaaggggtgatcccggtgagcatggtcggcagccaggggctgtttgtcgccattgtcatttcgctgctgtcgacggagatttatcgtttggtcgccagccgcaatctcgttatccgcatgccggacggcgtgccgccggcagtggcgaaatctttcctcgccctgatccccggcttctgtgtgctggcggtggtgctggcgctgcgcctggcggttgaggcctcgccgttcggcgacatcaacagcatgatcgccactttgatcggtattccgatgcatcacgtcggcggtacgctgccgggcatgattatttcagtcattttgattggtattttgtggaccctgggcctgcacggcgacgcgattgtgctggtatttattcagccggtgtggctgtcgaatatgtcagagaacctgacggcctttcagaacggccagccgatcccgcatatcattacccagcaattttacgacctgtggattgcgcccggcggcaccggcgcgctgctggggctggtgatatttatgttgctgcgcagccgtagtcagcagatgaaacagctggggaaaattgccgcgcccggggcattgtttaacatcagcgagccgatggtgtttggcatcccgctggtgatgaacccgtactttttcctgccgtttattttaacgccggtgctgctggtgatcgtgtcctataccgcgatggcgaccgggctggtggcgccgcccgccggaatcgcgctgccgttcaccacgccgatcttcatcagcggctatctggcgaccggagggcatatctccggcacggtgctgcaggtggtgaatttagcgatttcgctggtggtctactatccgttcttccgcgcctgggatcggctaaaggcaaaagaagagcacgcctcggcgcaaccccaagcgagcgctgcgattgctgatgccgaccgcgcataacctccagcctgacaaatcgtagccccggtgagcgttgcgccaccggggaaaagcgttatccctgcagccaccatatcgcttcgaacggccgcagcgtcagcccggtcgggcgcggggtggtctcggcatagttgctgatgatcatcttccactcgcccggggcctcagcgggctgccaggcctgcagctcgcggctcaggttagcggcgactaccagcgtttgcccctgccactgacgacgatagcaccacagcgacggatgctccggcagcagatcctcgtaatcaccccaggtcagtagcggcagggttttacgcagcgtaatcagctgctgataggtataaaacaccgaatcggggtccgccagcgccgcctcgacgttgatctcctggtaattatcgccaaggccgatccacggctcaccgtcgctgaagccaccgttctcgccggcgtgccacggcatcggcgtgcggctgttgtcgcgcgacttgctggcgaggatcgccagcagttcgtccgggctttgcccctgcgccgcacgttcgataaacatattgtggctttcgacgtcacggtaatcgctgatgctgctgaagtgcggattggtcatgccgatctcttcgccctggtagatatagggcgtgccctgcatgccgtgcagcaccatcgccagcatcttcgccgccgtcacccggtactcgccttcgtcaccaaagcgcgacacgatgcgcggctgatcgtggttacaccagaacagcgcgttccacgcccgattgtgcattccctgctgccagtggcggaacagcgccttcagcgccacatagtccgggcgggcgagggtccatttctctccgccgggataatcgacttttaaatggtggaagttaaaggtcatcgacagctcgcggccgtccagcgcggcgtactgctggcagtgctccagcgaggtggaggacatctcgccgacggtcatcaggttacgcggggtgaacacatcgcggctcatctcctgcaggaactcatgcacccgcgggccgtcggtatagaagcggcggccatccccgtccagatcgcagggaaaggtctggtcttttgagatcaggttgaccacgtcgaggcgcagaccgtcgacgccgcggtcagcccagaattcgcagacctttttcagctcggcgcgcaccgccggattctcccagttgagatcggcctgctcaatggcgaacaggtgcagataatactgcccgctgtcggcgtgccactgccaggcgttaccgccaaatttggagcgccagttgttcggcagggcgtccggttcgccatcgcgccagatatagaactggcggtagggactctccttattcagcgactgacggaaccattcatgttcggtcgacgtgtggttcagcaccatatccagcacgatacggatgccgcgggccttcgcctccgccaccagggcgtcaaagtcggccatcgtgccgtaggagggatcgatggcgatgtagttcgccacgtcgtagccgttatctacctgcggtgagacgtagaacggcgtcagccagatggcgtcgaccccaagcttttgcagatagtcgaggcgggaggtgacgccgcgcaggtcgccggtaccgctgccagtggtatcctgaaaactcttcggatagatttgataaataacgccgttttgccaccagtgggggagatgattcatagtactttcctgctgcaacgaggggcgccaaaggcgcccgaaagaagaagttagacaatctgcaaggtgccctgacggtacttgcgctgatacaccacgctggtgaggataatcggcaccaccaccgcgatagccatcgccatggcgtacacctgccagtaggtaggctggatggagaggatccccggcaggccgccgacgccgatgccgttcgccagcacgccgttcaggccgcacagcaggccggcgaggccagagccaatcattgcgcacagcatcgggaagcggtatttcaggttgataccgtacatcgctggctcggtgaccccgagataggcggagatcgccgccggtaccgagatttcacgttcattctgcttgcggctggcgatgatgatgccaaccaccgccgacgcctgggcaatattcgacagcgcaatcagcggccacaccggggtgccgcccatgctctggatcatctgcatatcgatagcgagggtggtctggtggacaccggtaatcaccagcggcgcgtagaggaagccgaacagcgcggcgccgatcggcgcgaagctgccggttaacagatggcgtaccgcgaaggccacgccgtcgccgatcaggcggccgaacggaccgattatggagtgcgcgaggaacaccgcgaggatcagcgagcagaccgggacaatcaccaggtagaggtagtcaggcacaatgcgcttgaggcgcgtctcgataaagcctaaggccaggccagccagcagggccgggatcacctgcgcctggtagccgactttggcaatggtaaacaggccgaagttccacacctccggcacctgctggccgaggagataggcgttcatcagctgcggggagacgagggtgacgccaaggacgatcccgaggatcggcgtgccgcccatcttcttcaccgctgaccagcagatccccaccggcagatagaagaagatcgcctcgccaatcagccacaggaagtcatagatggttttcagcgatggatacatctgggccagcgtctggccattgctcatgggcaggtcgccgataacgttgcggaaaccgaggatcagaccgccgctgatcagggccggcagcaggggaaagaagatctcggcgaagtgtgagattaattgttcatgccacttcatattttgccgcgcggcctgcttgacctgctctttgtcggcggaggtctggccggtggtcgccagcagggccttgtagtaatcgcccacctcggtgccgatgaccacctggaactggccggcgttagtgaagcatcccttcaccatgcgcagctgctcaatctcttttggtctggcgatggccgggtcgttcagcacaaagcgcaaacgggtaatacagtggctgacggtggcgatgttaccgcgcccgcccaccagttcgatcagtttatcgatgtcctgctggtttactttgctcatgatgaagcctcaaaaacagaggggagagatgccgtttttaccttgagggcatcctaaccgttccgcttaatttgcaaaatgggaacgttcccgaaacccggcgacgatcacataaatcgtccgagcgagattaattgagggcggcgggaatcacgatctggcggggatcgacgctgccggcgatctgctcgatcaactgccgggcggcccggcgtccggactcggcatagcccggatcgacggtcaagatttccgggtggagaaacttcatcagcggcgtgctgccgacgctggcgagctgcagcgcatcgcgaccctgctgctggaggtacttgctggcgccgagagcgagggtatccgtcgcgcagaccagggcgctggtttcagccatcagcacgctggcgacggtgtcatatccctgcttcatgcccagccccggcagggcggcggtgggcgtcagacgatgcttttcacagaaggcgaggtaggccagatggcggcgttcgccggtggtgacgtcgctgtgcggtacgccaagaaaactgatgtggcggtgtccgcgatcgtagagccgctgcatcagcagcgtgatggccccctcgtcgtcatagcacaccgaggcgaagccgggagcgtcgcgggccatcagcaccagggtgtcgcgccagggggcgagcatcgcttcgtcgatgccggtaaaaccgaacagcaccacgccgtcaatattgcgccgggcgagcatgccgagatgctcctccaccaacgccggggagaactggctctccatcataatcggatcgtaaccctgctcataaaaggcgggcagcatggtctgcacggcaaggttttccgacagcgaatcgagacgggtgacgataatcgccaccactttatcgctctggccgcgcatggcgcgggcggaacgggagggcgagaaaccgtgctgctgcatcaccgcttcgacgcgctcgcgggtccgttcgctgaccccgctctcgttgttaaggacgcgggataccgtcgatttccctacgccgcttaagcgcgcgatatctttgatggtcagccggttctgcatgcggaattctcgtcagggatggtagaagtgagcctaatgctactcaaccaaaccgcaatgagcaaagtctggtttacgttcggtttagttgcgcgggtttatcatcgccattattgccacacaatcctcagcgagggcgctataattcgcgccgtttatattcacttaccggagatagttatggaccccgatcccactcctcatcctcgatggagcaacctttctttccggtaagcctgtttaacactgctttaccggaaagcgtaaagcagtgacgtccttgatgtccctgccataaaaataacatgcctgacaggtaggttttgctacgcccgtcggcaacgctgcgttcgctttggcgagcgcggagggactgtttatgctgaaaaattatacccggcagctgttcgcgcagcttagccgccatctgccacgtcgtttagtccagcgcgatccgctgccggacgcccgccatctggcgagtggtcccattcctgaatcgcttggtcagcattgcctgaacgtggcggcgatggacgaccaggagatctggcgcgcctttgacagccaccctgaagggctcaatgaaggcgaagtggcggcgaaaattctcaaacatggtgacaaccagatcccggcgcagaagccctccccatggtgggtgcatctgtggacctgctatcgcaacccgttcaacctgctgctgaccgtgctcggcatcgtctcctattccaccgaggatctgttcgccgccggggttatcgccctgatggtggggatctcgacattgctcaatttcatccaggaggcgcgctcgaccaaagcggcggatgcgctgaaggcgatggtgagcaacaccgccaccgtgctgcgggtggtgaacgagcagggggagagccgctggctggagctgcctatcgaccagctggtgccgggcgacattatccggttgtcggcgggggatatgatcccggcggacctgcgtatcctgcaggcgcgggatctgttcgtcgcccaggcctcgctgaccggcgaatcgctgccggtggagaaagtggcccgcagccgcgatccgctgcagcaaaacccgctggagtgcgacaccctgtgctttatgggcaccaacgtggtgagcggctcggcgcaggccatcgtcttcgccaccggcggccgcacctggtttggccagctggccggccgcgtcagtgaacaggagagcgagccgaacgcctttcagaagggcatcagccgggtcagcatgctgctgatccgctttatgctggtgatggccccggtggtgctgctgatcaatggctacaccaaaggcgactggtgggaggcggcgctattcgcgctgtcggtggcggtcggcttgacgccggagatgctgccgatgatcgtcacttcgacgctggcgcgcggggcggtgaagctgtcgaagcaaaaggtcatcgtgaagcacctcgacgccattcagaatttcggcgcgatggacatcctctgcactgataaaaccggcaccctgacccaggataagattgtgctggagaaccataccgacgtctccggcaaggtctgcgagcgggtactgcatgccgcctggctcaacagccactaccagaccggcctgaaaaacctgctcgacaccgcggtgctggacggggttgagctggatgccgcccgcgggctggcggaacgctggcagaaggtagatgagatccccttcgacttcgaacgccgccgcatgtcggtggtggtgaaggaggatgacgccgcgcatcagctgatctgcaaaggggcgctgcaggagatcctcaacgtctcgacccaggtgcgctacaacggcgatatcgtaccgctggacgacaccatgctgcgccgcattcgccgggtgaccgataccctcaaccggcaggggctgcgggtggtggcggtggcgaccaaatacctgccggcccgcgaaggcgactaccagcgcgccgatgagtcggacctgatccttgaaggttacatcgccttcctcgatccgccgaaagagaccaccgccccggcgctgaaggcgctgaaggccagcggcatcacggtgaagatcctcaccggcgacagcgagctggtggcggcgaaggtgtgccatgaagtgggactggatgctggcgaagtggtgattggcagccagattgaagccatgagcgacgacgagctggcggcgctggcgaagcgcaccactttgtttgcacgtctggcgccgctgcataaagagcgtatcgtgacgctgctcaagcgtgaaggtcacgtggtgggctttatgggcgacggcatcaacgacgccccggcgctgcgcgcggcggatatcggcatctcggtcgacggcgcggttgatatcgcccgcgaggcggcggatatcattctgctggagaagagcctgatggtactggaggagggggtaatcgaaggccgccgcaccttcgccaacatgctcaagtacatcaaaatgaccgccagctccaacttcggcaacgtcttcagcgtgctggtggccagcgccttcctgccgtttctgccgatgctgccgctgcacctgttgattcagaacctgctgtacgatgtttcccaggtggcgatcccgtttgataacgtcgatgatgagcagatccgcaaaccgcagcgctggaacccggccgatctcgggcgctttatggtcttctttggaccgatcagctcgattttcgatatcctcaccttcggcctgatgtggtgggtgttccacgccaataccgtggagatgcagaccctgttccagtccggctggtttatcgaagggctgctgtcgcaaacgctgattgtgcacatgatccgcacccggcgcattccgttcgttcagagccgggccgcctggccgctgttcgccatgaccctggtggtgatggcggtgggtatcgcgctgccgttctcgccgctggcgagctacctgcagctgcaggccctgccgctgagctacttcccatggctggtggcgatcctggcgggctatatggtgctgacccaggccgtgaagggcttctacagccgccgctacggttggcagtgagggacgcgttttcggatgaaccacgtaaaaaaggcagcctgcgggctgccttttttcatgccgaggttagcgatcagcgacgcacggcgatagcttcgatctcgatcttcacgtctttcggcagacgtgcgacttcaacgcaggagcgcgccgggaaggtggcgttatgctcggtgaagaacgcttcgtaagtggcgttaacggtagcgaaatcgttgagatctttgacgaatacggtggtcttgacgatatcgccgacggtgaggccagcggcttcaacgatcgctttcacgttgttcagcgactggcgcgcctgcgcggacacgtcttccgggacgctgccggttttcgggtcgaccgggatctggccagaggtgatgatcatgctgccgaggtcaacgccctgaacgtaggggccaatcgccgctggtgcattttccgtcgcaatagttttgctcatgttatctccagatgaactgagtaatgttacgcaaaatcattcaggttgccgccaggcggtaagcgctgtatcgccggcgcagacgccgcctgaaggacgaagcgtagggtggtagccattatagggaggcctaccaccaataccaaccgcatttagttggccagcaccacataatgagaaaactctttttcgcagtatttgcatttgagtgcgatgtcatcagcgcgttttttcactgcaaaactggaagaaaccggttcggcgtggctgatacagttgctgttcgggcagaccagcacgctgtcgatacgatccggcaggctcgggcgggatttgcccaccacttcgtaatcatcaatgcggtttaccgtcgcctgcggggcgtacagcgacagctggttaacctgctcgtcggtcaggaaggtgttctcgattttaatcaaatccttgcggcccatctcgccggagggcaggttcaggccgatggtgatgcgctggtcggtttcggtcagtttgaacagggtgagcagcttaaagccgacctgcgccgggatatggtcaatcacggtgccgcgtttgatcgcttctacctgcagtttattgtcgtgtgtcatctctcattcccccttacagtgccagctcgctattcagtaccagtgccagtaacgcctggcgggcgaagatgccgttaccggcctgctggaagtaccaggcgtgcggtgttttatcgacatcggtggtgatttcgtcaatgcgcggcagcgggtgcagcactttcatgttggcgcgcgccccttcgaggtcggcggcgcgcaggacgaactgcgctttgacgttggcgtattccgacggatccagacgctctttctgcacgcgggtcatgtacagaatatccacttccgccatcacgtcgtcgatggcgctatgcaggctccaggcgatgcctttttcatcgagcatatcgaggatgtactgcggcatggccagcgcgtccggggcgatgaagtagaagcggttgccgttgaatttggccagcgcctgggtcagggagtggacggtacggccatacttcagatcgccgaccatcgccacgttgaggttttcgaggcggccctgggtctcctgaatggtgaacaggtcgagcagggtttgggtcgggtgctggttagcgccgtcgccggcgttcagtaccggcacgccgccggagaattcggtcgccaggcgcgcggcgccctcctgcggatgacgcatcacgatggcgtcgacgtaggtgctgatgacggagatggtatccgccagcgtttccccttttttgcccagtgaggtgttggcgctgtcggaaaagccgaccacgctggcgcccaggcggtgcatcgaggtttcaaaagagaggcgggtgcgggtcgaggcttcaaagaaacagctggcgataaccttatgcttcagcagctcgggttgtggattggctttcagctttgccgccgtcgccagcaccagttcgaggtcttcgcggctgagatcgtttatggaaatgatatgtttttgatatagcgggttagccatgcttatctcctgacgcctgggcaaaaaaaagccccttaaataaggggcttcgggaatccaatgagcaacggaaagaaaaacggcaggccagcgtctgcattgagacgcgctaagacagaatgtcgtacgcaattggccatgcttcctcccggcaaaacgactggcattatacgcagaccgttatgacgatcaagcgattcattcacaaacaggtaatcgtttgcctgtcgaaaagtgcgccagcgcaaagaagcgtgaaactgtactggtatggcagccgcgatgggggtataacacgataaaatgaaatgctgttttatatttgaggtaagcaatgattattggcaatatccaccatctgcagccatggctgcctgccgcgctgcgcgaggctatcgaacaggttatcgctcaggtcagcgaggcgacgccgctgggtaaacacgatatcgacggcgacaacctgttttatctgatttctgaagacaccaccgagccgcaggccgcgcgccgcgcggagtaccatgctcgctatctcgatatccagattgtgctccgcggcagcgaggggatgaccttcagcaccttgccgccaggagagccgcagaccgactggctggcggagaaagacatcgcttttcttgccgaaggccagcaggagaaaacggtgatcctcaacgaaggggactttgtggtgttttatcccggcgaagtgcataaaccgctgtgcgccgtaggcgccccggcgaaggtgcgcaaagcggtggtgaagatgctgatggcgtaaaatggcgaaccgaatcccggatgaacgccgtgccatccgggacacagccgcgagcgaggggctatttgctcagcgtcgccaccatcaccgctttgatggtgtgcatccggttttccgcctggtcgaagaccacgctcgccgccgactcaaacacctcgtcagtcacctccatgccgccgtgcaggccgtaatcggcagccatctgtttgcccagcgtggtctggtcgtcgtggaacgccggcaggcagtggaggaacttgacctgcgggttgccggtcagcgccagcatcgcgctgttaacctgatagtcgcgcagcagggcgatacgttcggcccatttttccttcgcctcgcccattgagacccagacgtcggtatagataaaatcggcgcctttcacccccgcggcgatatcttccgtcagggtgatgttgccgccctgctgtttggccagcgcggtgcaggtctccaccagcgcggcctccggccagcaggccgatggcgccaccaggcgcagatccagaccggtcaacgcggcggcttccagcatcgaattgcccatgttgttgcgcgcgtcgccggcgtagaccagcgtcatctggttaaaggctttgcccggcagatgctctttcatggtcagcaggtccgccagcagctgggtggggtggaactcgttggtgaggccgttccacaccggcacgccggcgtattgcgccagggtctctaccacttcctggccgtggccgcggtactgaatgccgtcgtacatccgtccgagcacgcgggcggtgtccttgatcgactctttatggccaatctggctgccgcttggccccagataggtcacgcgggcgccctgatcgtatgcggcaacttcgaaagagcatcgtgtacgggttgagtctttttcgaagatgagcgcgatgtttttccctgccagtttctggacttcgataccgtttttcttatcggctttcagctttgccgccagctcgagcagggcggtgatttctgcaggcgtaaaatcgagtaactttaaaaaatgcttctggtaaaacgcagacatggttccctcacctggcataggccactaattgaattaaaattcaatttatatgtatgaatattcatttgcaagtctgtgatcgaaatctttcactgagaagtggaggcaatgacggcggtatgtgacaatagggataactgccgcacattatgaggaacgagccatggcaaacccggaacacctggaagaacagcgtgaagagacgcgtctgattatcgaagagctgctggaagatggcagcgatccggacgcactgtacacgattgagcatcacctctctgcagacgatttcgaaaccctggagaaagtggcggttgaagcgttcaagctgggctacgaagtgaccgagcccgaagagctggaagtggaagagggtgacatggtcatctgctgcgatattctgagcgaatgcgcgctgaacgcagacctgatcgatgcccaggtggaacagctgatgacgctggcagaaaaatatgacgtcgagtatgacggttggggcacctattatgaggacccgaacggtgaagacggcgacgacgatgacgaagagtatgtcgatgaagacgacgatggtgttcgccactaagtcgcaaatgtcgtagatggatacggcggcgcctgccgccgtatagcaaggaactttcatggattacccgcagattctttccccgattatcaacttcctgcactgcccgacgccgcaggcgtggattgacgaagcccgcaagccggaaaacctggcgctgctgctgaccgaccacatggtgtgcgagctgaaagcggcgcagaacgccatgctgctggtgcgtcgctacgtcgcggataaagctgacgccgacgaactgttggcctgcctgaagccgtacgaagacttcacctaccgccgggggccggagccggattttgtcaccctgcataaacggatcaacaaaagcgccatgccgcagaccgacgacccgtggggtcgccagctgctggacagcatgattttattgattaaagaggaactgcatcacttctggcaggtgcgggagatgatgctggcgcgcgatatcccctatgtcaaaatcaccgccagcaactatgcccgcggcctgcggcgcgaagtgcgctcgcatgagccggtgatgctgatcgataagctgatctgcggcgcctatatcgaggcccgctcctgcgaacgctttgccgccctggcgccgcggctggacgacgatctgcaaaagttctacctgtcgctgctgcgctccgaggcgcgtcactatcaggactatctggatctggcgcagaagattgccggagaagatatcagcgagcgggtgcgccagctcggcgaggcggaagcggcgctgatcctccgtcccgaggccgagttccgctttcacagcggtgtgccggtagcggcgtaacccacgatattcgggccctgtagccccggtagccactaacaccggcagtttcagtagccatggggagagatagcgttgagagcttcagctcgcaatggtacgggccgtaggtcgggtaaggttagccgccacccgacaaaaaaacggcaccgcgagcacgggtaaggtgccattcgggacatacccggctcgcgctacgcttagccgggctaccgaactgtagccccggtaagcgtagcgctaccggggacgcctgcgatatcgaggcgctacagcgttttcagcatccgtacttcgcagtccacgtggccggtgcagcccagcggcccgtcaatgtgctcgaagccaagatgttcatataagccgatcgcctccgtcaggaaggcggtggtttccagatagcagcgcttaaacccttgttcgcgggcgtagtccagcgccagcagcgccagcttcttcgccagcccctggccgcgggcgctggtcataaaatacattttctgcagttcgcagatatccggctcgctgcaggcgagcggcgcgacgccgccgccgccaaccacttccccctcttgctccaccacccagtaggcggagcccggctggctgtacagctcatacagctcatcgagattcgggtcggcgaccgtatagcctttatcggcggtcaggccatattcagccgagacctggcggatgaccctggcgatggcggcattgtctgccgccgtaatgcgacgcagcaacgtcgccgcggggacgctcgtattcatacaatgactcattacccaaaaaagacgaatgatgatgttaataacatcgcgacaggggaaagcgcaagcgaggatgtttcataaaaaacgccccttgccgggtggcaaggggcgggaggatcacagcgcggcgatcaccgcctgctgttcaatcagcttcgctttcgcttccgcgtagccttccagcttctcgcgctctttagcgatcaccgcttccggcgcgcgggcgacaaagccttcgttggccagcttgctctcgatgcggccaatttcaccttcgattttggccacttctttcgccagacgcgccagctcatcttctttattgatgaggcccgccatcgggatcagcagctcggcgccgtcgacaatcttggtcaccgagaccggacctttatcatcggcaggcagcacggtaatgctttccagacgcgccaggttcagcaggaagctgcggttgtcgttcacacgacgctcggcctctttgctgcagccgcgcagcagcagttccagcggtttgcccggagcgatgttcatttccgcacggatgttacgcacggcgacgatcgcctgcttcagccattcggtgtcggccagcgccgcgtcatccacctgagaagcatcgtactgcgggaacggttgcagcatgatggtgtcggcggtgatcccgcagatcgctttcacgcgctgccagatggtttcggtaatgaacggaatgatcggatgcgccaggcgcagcagaccttccagcacggtgaccagagtatggcgagtcccgcgcagctccgcttcgttgccaccgttcataaccggcttggtcagctccaggtaccagtcgcagaactggttccaggtgaactcatacaggatgccggcggcgatatcgaagcggaagttatccagcgcttcgcgatacgctttcacggtgtggttgaattccgcgatgatccagcggtcggcgagggagagcaccatttcgccgccgttgaaaccgcaatcctgatcttcggtgttcatcagcacgaagcggctggcgttccacagcttattacagaagttacggtaaccttccagacgcttcatatcccagttgatgtcgcggccggtagaggccagcgccgccagggtgaagcgcagggcgtcggtgccgtgcggctcgatgccgttcgggaactgtttctcggtacgcttgcggattttatccgccagctgcggctgcatcatgttgccggtacgtttttccagcagttccggcagggtgataccgtcaaccatatccagcgggtcaatgacgttacccttggacttggacatcttctggccttcgtcatcgcggatcagaccggtcatgtagacggtcttaaacggtacctgcggcttgccgttttcatctttgatgaagtgcatggtcatcatgatcatgcgggcgatccagaagaagatgatgtcgaagccggacaccatcacgctggtcgggtggaactgacgcagggcatcggtgttttccggccagccgagggtggagaaggtccacagcgcggaggagaaccaggtatcgagaacgtcttcatcctgacgcagggcaacgtcggcgctcaggttgttttcctgacgcacttcgtcttcgctacggcctacgtagacgttgccgtcgttgtcataccatgccgggatgcggtgaccccaccacagctgacgggagatacaccagtcctgaatatcgcgcatccaggagaagtacatgttttcgtactgcttcggtacgaactggatgtcgccgttttcaacggcttcgactgctggcttggccagcacgtccgcgcgcacgtaccactggtcggtcagcatcggctcgatcaccacgccgccgcgatcgccgtaagggacggtcaggtcgtgcggtttgatctcttccagcaggccgagggcgtcaaccgccgcaacaacggctttacgcgccgcgaagcgttccagtttctggaactccgccgggatctcgctggagtagacgtcggattcattgcctttggtgtcgtagacttccgcgctttcgcggatgtcgccgtcaaaggtgaggatgttgatcatcggcagctggtgacgacgacccacttcgtagtcgttaaagtcgtgcgccggggtgatcttcacgcagccggtgcctttttccatgtcggcgtgttcgtcgcccacgatcgggatgcggcggttaaccagcggcagcaccacgaatttgccaatcagatctttgtagcgcggatcttccgggttaacggccacgccggtatcgcccaagagggtttccggacgggtggtggcgaccaccaggtaatctttaccgtcagcggttttcgcgccatcggccagcgggtagcggatgtgccacatggaacctttcgattcgcggttttccacttcgaggtcggaaatggcggtgcgcagtttcgggtcccagttaaccaggcgtttgccgcggtagatcaggtcttctttgtacaggcgaacaaagacttctttcacggcattggaaagcccctcgtccatggtgaagcgctcgcgctcccagtccacggagttgccgagacggcgcatctgacgggtaatggtgccgccggattccgctttccactgccagattttgtcgataaaggcgtcgcggccgtagtcgtggcgggttttcccttcttcagcggcaatcttacgctcaaccaccatctgggtagcgatacctgcgtggtcggtaccggcctgccacagggtgtttttgccctgcatgcgctggtagcgaatcatggtatccatgatggtttgctggaaggcatgacccatatgcaaactgccggtgacgttcggcggcgggatcatgatgcagaagctctcctggctttcatcaccattcggtttgaaatagccctgcttttcccagtgctcgtaaagcggctgttcgatatcttgtgggttgtatgtcttttccattatttccaggttgccgtgttcaggttgaaaccagccatgcggtacgccttatagcgttcgcgcgccagttgtttcagattgtcttcgtaagggacaaagtctatcacttctgtgaaagcggtggcaaaatctgcaaagtttagccgcaggctgataagaatatcccgcgggctgctgttgcgcttttgcggccaggcaatctctaccggcgcgccgcctctcgggccttcgcccgccaggttatgcggcacaaagctttccggcggccgcgaccacagcgcctcgtcgaggcgaatcgcctgctgttcatcttcgcaggcgatcaggacgcgcttgccgttgcgccaacgttctgcggcaatgtcacacaccagctgctcgacggcgctcaggccgtcgacggtggcgtcattgtccagaagatagaacgttgcgtttttcatatatggggcttcttgttgtggatttaaatgcaaagccgggcggcgctacgcttacccggcctacagtgtgctgccgtttgtaggccgggtaaggcatcgccgccacccggcatgtcacatcactcttcgccgttaaaacccgcacgattgagcaggaactgcgacagcagcgccaccggacgaccggtcgcgcctttggccttaccggaacgccaggcagtaccggcgatgtcgaggtgcgcccagttgtacttgcgggtgaagcgcgacaggaaacagccggcggtgatcgcgccgccaggacggccgccaatgttcgccatatcggcaaaattggactccagctgatcctggaactcgtcggccagcggcaaacgccatgcgcggtcgcccgccagttcggaggcgccgatcagctcatgggccagcgggttatggttcgacatcaggccggtaatgtgatggccgagggcaatcacgcaggccccggtcagcgtcgccacgtcgataaccgcttccggctcgaagcgctcaacgtaggtcagaacgtcgcacagcaccaggcggccttcggcgtcggtgttcagcacttccaccgtctggccggacatagtggtcaggacgtcacccggacgataggcgcggccgccaggcatgttttcacagcccgccagcacgccgatgacgttcagcggcagctgcagttcggcaaccatccgcatcacgccgtacaccgccgccgcgccgcacatgtcgtacttcatttcgtccatgccttcggcaggcttgatggagataccgccggagtcgaaggtcaggcctttaccgaccagcacgatagggcgcgcgtcctcagccgggttgcctttatattcgatgaccgacatcagcgactcgttctgcgacccattgccgacggcgaggtaggcgttcatccccagctcgcgcatctgctgttcgccgatcacccgggtgatgacgtttttgctgtaggtatcggccagctgacgcgcctgggaagccagataggcggcgttacagatgttcggcggcatattgccaagatctttcgccgctttgatgccggcggcaatcgccaggccatgctgaatggcgcgttcgccgctggtcagctcgcgacgggtcggcacgttaaagaccattttacgcagcgggcgacgcggctcgcttttgttggtcttcagctggtcgaagctgtacagcgtctctttggcggtttcaaccgcctggcgaactttccagtagttgttacggcctttgacgtgcagctcggtcaggaagcagacggcttccattgagccggtatcattcagggtattgatggttttctggatgacctgcttatactgacgctcatccagctcgcgctctttgccgcagccaatcagcagaatgcgctcagacagaatgtttggcacatggtgcagcaataacgtctggccaggtttgccttccagctcgccgcgacgcagcagggcgctgatgtagccgtcgctgattttatcgagttgttcggcgatgggggagaggcgacgtggttcaaagacgccgaccacgatacaggcgctccgctgcttctccgggctaccgctttttacactgaactccatgcactatgctcctgaatcttaaagacaacagtggtggctacggctatactcgtcgcctttcaagttgcagatgcgccggctgcgcctgcttaccctgacgtggcacattgtgcgcgccaggggccacagccctgctgccttcttacaactcgaaatccattgagtatataattgcaagctttcgtaactcatatccgctgttgcggtgacttcgtgttaatcttaacgttattaaggcctgggttcgtcagaaaagatcctgacatgcagaaccgatgagtcatttaatcttagcgacgttttcgacgaccaaagagaataaatgacgtttaagccatgaaacaagcaattttcctgcactaaaacgggtttttacgggcgtatttatagtgataatcataagatatctggttcgtgagacgctgaaaagccagttggcgatcctattcatcctgttactgattttcttttgtcagaaattagtcaggatcctcggcgccgcggtggatggcgatatcccaaccaatctggtgctctcgctgttggggctcggcatcccggagatggcgcagcttatcctgccgttaagtctgttccttggcctgctgatgaccctcggcaagttgtacaccgaaagtgaaattacggtgatgcacgcctgcggcctgagcaaagccgtgctgatcaaggcggcgatgatcctcgcgctgttcaccggcgcggtggcggcggtgaacgttatgtgggcggggccgtggtcgtcgcgccatcaggacgaagtgctggccgaagctaaagctaaccccggtatggcggcgctggcccagggccagttccagcaggccagcgatggtaacgcggtgatgtttatcgaaagcgtcaacggcaaccgtttccatgacgtcttccttgcccagctgcgtccgaaaggcaatgcgcgcccctcggtggtggtggcggattccggcgagctgtcgcagcagaaagacggctcgcaggtggtgaccctcaacaagggcacccgctttgaaggcaccgcgatgctgcgcgacttccgcattaccgacttcaataactatcaggctattatcggccaccaggcggtgagcgccgatccggacgacaccgaacagatggatatgcgcaccttgtggaaaacccacaccgaccgcgcgcgcgccgaactgcactggcgcttcacgctggtggcgaccgtcttcattatggcgctgatggtggtgccgctcagcgtggtgaacccgcgtcagggccgcgtgctgtcgatgctgccggcgatgctgctttacctggtgttcttcctgctgcaaacgtcgattaagtcgaacggcggcaaaggcaaaatggacccggctatctggatgtgggcgattaacctgctctattttgcgctggcggtgctgttaaacctgtgggacacggtgccgatgcgccgcttccgcgcccgttttaataaaggagcggcctgatgcaggcgtttggcgtacttgaccgttatatcggtaagacgattttcaacaccatcatgatgaccctgttcatgctggtgtcgctctccggcattatcaagtttgtcgatcagctgaaaaagtccgggcagggcagctacgatgcgctgggcgctggtctctacaccatcctcagcgtgccgaaggacatccagatcttcttcccaatggcggcgctgcttggcgcgctgctggggctggggatgctggcccagcgcagcgaactggtggtgatgcaggcatccggtttcacccggctgcaggtagcgctggcggtaatgaaaaccgcgatcccgctggtgctgctgaccatggccatcggcgagtgggtggccccgcagggcgaacagatggcgcgcaactaccgtgcccagcagatgtacggcggctcgctgctctcaacccagcaggggctgtgggcgaaagatggccacaattttgtctatatcgaacgcgtaaaaggcaacgatgagctgggaggcgtcagcatctatgccttcaacccggagcgtcgtttacagtcggtgcgctatgccgcttcggcaaaattcgatagcgaaaataaagtgtggcgtctgtcgcaggtggatgaatccgacctgaccgatccaaagcaggtgaccgggtcgcagatggtgagcggcacctggaaaaccaacctgacgccggacaaactgggcgtggttgccctggatccggatgcgctgtcgatcagcgggctgcacaactatgtgaaatacctgaagtccagcggccaggatccgggacgctaccagctcaatatgtggagcaaaatcttccagccgctgtcggtggcggtgatgatgctgatggcgctgtcgtttatctttggcccgctgcgtagcgtgccgatgggcgtccgggtggtgacggggattagcttcggctttatcttctatgtcctcgaccagattttcggcccgctgaccctggtctacggcataccgccgatcatcggcgcgctgttgccgagcgccagcttcttcctgataagcctctggctgatgatgcgcaaggcctagcgggtaagcctgaaacgtaagccccctcagcgatgagggggcttttttttagcgcttgcgtccgcccagcaggctgcccagcatgccgcggacgatctgattggtgacctggcgaaccgcgcttttcgctgcggtctgcacgataccgtcgcgtttaccgccccgcgggccggtgctgccgaacaggatatctttcaggccgccaagcagcccgtcgtcatcgccgttctgctggcccttcgccggcggagccgactgctgcccggtggcgacctgcaccccttgctgcagcatttcgaaagccgactcgcggtccacctcctcctcatacttaccgtacagcggcgagtggttcagcagaccattgcgctcgtcatcgctgaccggccccattcgcgaacagggggcgataaccatcgcccgctcgaccaccgacgggctgcctttctcatcgaggaaggagatcagcgcctcgccggtgcccagctcctggatcgcctgctcggtactgaaggccgggttggcgcgcatggtctgggcggcggttttcaccgccttctggtccttcggcgtaaaggcgcgcagggcatgctgcacgcggttgcccagctggccgagcacggcgtcgggaatatccgccgggttctgcgagacaaagtagacgccgacgcccttggagcggataaggcggatcacctgttcaattttatccagcagcacctgcggcgcgtcgttgaacagcagatgcgcctcatcgaagaagaacaccagcttcggtttatcgaggtcgccggcttccggcaggcgctcgtagagctcggagagcatccacagcaggctggcggcgtacagcttcggcatctggtagagcttttcggcgctaaggatattgatcacccctttaccgctggcatcgacgcgcatccagtcggcaatatccagcatcggctcgccgaagaagtgctcggcgccctgttgctccagggtcaacagcccgcgctggatggcgccgatcgaggcgctgttaatattgccgtactggttctggaaagacttggcgttatcgccgataaactgggtgatggcgcggaggtctttgaagtcgagcagcagcaggccgcggtcgtccgcgatgcggaaaataatgttcagtacgccgctctgcacctcgttgagattgagcaggcgcgccagcagcagggggccgagatcggagaccgtcgcccgcaccgggtggcccttctcgccaaagatatcccagagcaccaccgggttggcgtgcggctcccagtcgctgacgccgatcttctccagccgcgcctgcagtttctctgagctctgccccgcggcggcaatgccggtcaggtcgcccttgacgtcggccataaataccggcacgccaatctccgagaacgactcagccagcttctgcagggtgacggttttaccggtgccggtcgcaccggtgataagcccatggcggttggccatcgcgggcagtaaatagagcgcgttatccagcgtgcgcgcaatcaacaggggtgagctcatggtcgattcctccatttatcctgcgacgattataggcaacctcgtcgtccggcgttgggaaaatcgtcacgcgccgcgcacgctgtaccgtgagggtctcaggcgcagtggcgctggatgagcgcgatgctctgctcaatttcgcgctcgatatccgcttcgctccattgcgccagctcgggggcgaagggctcaaaagcgtacaccccctgatagccgcgggcttccagcgctttaacctgctcgcaggtgccgagacgatcctgcggggttagcatgatgcgctcggcatcggtgagctgctcgcgcggacggctatcgtccactcctgaaaggtgcaccagcccgatatccgccacctctacctggctgaactcgtccgccgcctgcgggtaaagatggtgatggaaggtgtcgatcagcagcttaaacggcacgcgggcgtcgtggatcagcgtctgcgcctggtgcgcagaacgcagcgagctttgcgggaagcccagcggctccaccaggccgtggatgccatagaaggcgaacagcggcgccaggtcgcgcagggcgcccagggtttcgctggccggcacctcgctgccgtcgttgagcggacagagcaccagcgatttggcgccgatggcctgggcctctttcagcagcgattcggtcaactgccgcacctcttcgctacgacggttaaaggggtagaccgcgttaatcgtcaggatctcgatgtggtagcgcgccgccagctcgcgcacctgctgatggctcagatcgtcggtcacttttccgctgggtaaatcgttgcgcagctcgaccttattcaggcccagacggttcaccagacggaaaaacgcttcaatgctgagcgctggcgcgattttgcggttaatacaaaaacgttgcattgcgatggccataggacactcctgacggaagagggggtaggttcgttcaattggctaacagtcaaaacgtttattccaaaattagcaagaatggaaatgatgaatgtttgagctgtctcgcaaaatatcaccggcaccgactaccggcgcgacagcggcgggaagcctggcgtcgagggcaacgaggcgcgatgcgggaagcgcacaggcgaccggttagcgcaaaatgcgactgttatcaccaaaatgaaatttcatttcacaacaatgttgaaatataaatttcattttactacggttatagcacagcagaatcagcgacgggccggtgtgcgctggcccccttcactatgaggcgagaacatgacgatcacaggaaactttattggcgggaaaaccgttattagcagcagcaacgaaacgatgccggtgtacgacccggcgacgggcaaagcggtgcgcgaagtcacggtgtcaaccgcgcaggaagtctccgaggcgattcaggttgctcgcgatgcgtttgacagctggtcccgtaccacgccgctgcgccgcgcccgcgtgctgttcaacttcaaaatgttgctggagcagcacgtggaagagctggcggggatcatcgtcagcgagcacggtaaggtgtggtcggatgcgctgggcgagctgacccgcggtatggaagtggtcgaattcgcctgcgggatcccgcacctgattaaaggcgaatactcctctgacgtcggcaccggcgtcgacagctactcgttgatgcagcccctgggcgtggtggcagggatcaccccgtttaacttcccggcgatggtgccgatgtggatgttcccgctggcgctggcctgcggcaacagtttcgtcctcaagccgcccgcgctggcgccgacggccgccgtgcgtctggcagagctgctgaaagaggccggtctgccggacggcgtgtttaacgtcgtgcactgcagcaatgaagatgctgagcagctgtacactgatccgcgtattgcggcggtgagcttcgtcggctcctccggcgtggcggagtatatctataagaccgccagcgcccacggcaagcgcgtgcaggccttcggcgccgccaaaaaccacgcgattgtgatgccggatgccgatctcgacgctaccgttaacgccattatgggcggcgcttttggctccgcaggcgagcgctgcatggcgctgccggtggtggtggcggtgggagatgaaaccgccgacaaactgatcgcccgcctgaagccgctggtggaagcgctgaaagtaggtccgggctgcatgcgtggccaggaagagaacgagatgggaccggtggtgtctgatacccatcagaaaaaagtgctcggctatattgataaaggcgaaagcgaaggggcaaaactggtggtcgatggccgcaaactgcgcgtgccgggttacgacgcgggctactatgtcggcggcaccctgttcgatcacgtcaccccggagatgaccatctggcgcgaagagatctttggcccggtgctggggattgtgcgcgcggcggactatgacagcgcccttgagctggtcaacagccacgagtttggcaacggcagcgccgttttcaccagcaacggccacaccgcgcgtgaattcgtccacgacgtgcaggcggggatggtcggggtgaacgtgccggtcccggtgccgatggcgttccacagcttcggcggctggaagcgctcggtgtttggcgcgttgaacgtccacgggccggacggcgtgcgcttctacacgcgtatgaagaccgccaccgtacgctggccggcagggcagcagaccgtatctgaattcagcatgccgacgttaggttaatcggcgaaggagagcgccatgtcgttactggctaaatcgcgaaaagagggacagatccagcatattacgccgcaaagcgccggttggcgctatatcggctttgatgtctggatgttgaaaaaagggcagaccgtgacgctggagagcggcgatcgcgagctgtgcctggtgctggtcgccgggctggcgtcggtgaaaacgcagcatgccgatttcccgaatctcggtaaacggatgtcgccgtttgaacgcaccccgccgtggtcggtctacgtcccgccgcaggataaagtcgaggtgactgccgattccgatctggagctggcagtatgcagcgcgccgggcaaaggcagcttcccggcacgcctcattcggccggaagacgtcggcgtagagcaccgtgggaaagggcgcaatcagcgccgggtgcataatattctgccggacagcgccgaggcggactgcctgctggtggtggaagtctacaccgacgagggggccaccagctcgtggccgtcgcataagcatgataccgcccagccgggcaaagagacgcagctggaagaaacctactatcaccgcttcgatccgccgcagggctttgccttccagcgggtctacaccgacgaccgcagcctggacgcctgtatggcgccctacaaccacgatgtggtgatggtgccgcgcggttaccatccggtggcagcgattgccggttacgatagctactatctgaacgtgatggccgggccggaccggaaatggctcttcacctgggaagatgaccacgcctggatcaacacgccggagtacccgcgccacgactgacgcgaggtgcagaagcggataaagaaggccggttagcgatgctaaccggccttcctgtttgagggcggcgggtgttttttcgcgaaacgctccgcggaatcccactcccgacccggcaagcgcagcgccgcaggggaggatacctccggcgccatacccgcctttgtgccggatggcgctacgcttatccggcctacggcctcctcccgtaagctcctataccccaggcccggtgctgcttttatgccgggcggcggctcacgccttgcccggcatacggttcgtgcgacctgccgttaatttattcaccattgttgctgaaactgccggtgctgacggcctcaaaatcgctgagacgttcccggaaggccggggcagcccgcatggatgcgggctgagggccgtgttttgcacggacgctgcctcggcccgacccgaagcctgcagggataagtcgaagggaccgcgtagcggcgattttgctggccggagcccggggggacagggggcggcggcgactggccgccccctgtgcgctccctgcgccatgccaggcataacgcagaagattaaccgggagcgcaatgtgcgctgaaatcacatgcgacaaacgctttacccggattaataaagttgcataccaataacattatctccggcaccccgcaggcgcatataccccaggcccggcaagcgcagcgccgccggggaggacaccaccggcgccatacctgcttttatgccggatggcgctacgcttatccggcctacgggagcctcccgtaagcccctataccccaggcccggcaagcgtagcgccgccggggagggcaccaccggtgccatacccgcctttgtgccggatggcggcttcgccttatccggcctacgggatcctcccgtaagtccctataccccaggcccggcaagcgcagcgccgccggggaggacaccaccggtgccattcccgcctttgtgccggatggcggcttcgccttatccggcttacgggagcctcccgtaagcccatataccccaggcccggcaagcgcagcgccgtcgggcaggacacctccggcgctatacccgcctttgtgccggatggcggcttcgccttatccggcctacggcatcctcccgtaagctcctataccgtaggcccggcaagcgcagcgcgaccgcaggcacggtgctgcttttatgccgggcggcggctcacgccttgcccggcatacggttcgtgcgacctgccgttaatttattcaccattgttgctgaaactgccggtgctgacggcctcaaaatcgctgagacgttcccggaaggccggggcagcccgcatggatgcgggctgaaggccgtgttttgcacggatgctgcctcggcccgacccgaagcctgcagggataagtcgaagggaccgcgtagcggcgattttgctggctggagcccgggggtacagggggcggcggcgactggccgccccctgtgcgctccctgcgccatgccaggcataacgcagacaattaaccgggagcgcaatgtgcgctgaaatcacatgcgacaaacgctttacccggattaatagagttgcataccaataacattatatccggcaccccgcaggcgcatataccccaggcccggcaagcgtagcgccgccgggcaggacacctccggcgccatacccgcctttgtgccggatggcggcttcgccttatccggcctacgggatcctcccgtaagtccctatacaccaggcccggcaagcgcagcgccgccgggcaggacaccgcagataccgtagccatttttgtgccggatggcggcacaaatgccttatccggcctacgggatcctcccgcaggcctatactgcgccgccgagtaacaaacgccaggcagcctatctcacgccttctgcttggcctcggactcctggctgctgttcagcgccagcgaaaccgccagcgtctgggccagacacagggaagcaacctgcgaacggaagccatccacctgcgcttcacgcaccacaaagcagacatcgctgaaggccgccagcgggctgacctggctgtcggtaatggcgatctgccgcgctttgcgctgcgcgcccagctccaccagctcgaccacttcccgggcgtacggcgagaagctcaccgccactaccacgtctttcggaccgaccaggctcagctgctcggtgaacatgccgccgaggccgtcgatcagaaaggctttgcgatcgaggtgacgcagcgcataggtcagataggaggcgacgctaaacgaccggcgcagaccaatgacgtaaatattttccgcctcgcccagcagggccaccgcgcgctccagatcatcgctggaggtctgcatcgccagctgctgcaacgcctggttgttcaccatcgtgaacatattgaggatttccgtcggcgtttccggcgggctggactcatcgctggtggtctggcggaacagacgggcgcgctcggtatagttggcggtctcttccatcaaatgttgcttgaacatctgtttcatttcgttaaagccgctgaagccgaaggcgttggcaaaacgaatcaacgtggaagggggaacatccgcctgttgcgcaatggaggccacggtatcgaaagccacgctattgctgttatcaaggatatagcgggcgacctgtttcaggcgtttgcttaacgtatcgtagcgacgcctgatttcatcctgcaggatggtcagctgtgttgggttattggccatagagtgcgctctgagaaaatggaaggaatatggcttccagtgtaccaaatgaagcgaatttttcatttattgcgacgaaatacgcgattcatttcacgaagaaacagaaaaacgcccgctccgcaaggtgacggagacgggcgtcgggggatcagcggcgggcttcgcgccagtagccaatgagcgtcaggtagttgcgtttcacttcttctatcagggcctcatcgctgagctcaccctgcatccagcgccgcgacggctggccaaagatggtgcgcccgacggcgaaacctttgatcatcgggtgtgcggccgcctcggcgaaaccggcgcgcagtttgtcggaaggcgcgtcaagcccgaggatcaggatccctcggctccacggatcttcacgctcgataagcgcggtgatctgctgccagctggcgctggagagcggcggcagcttccaccagtccggcttgatccccagctgatagaagtgttccagcatagtgtggtaatggcgctcgtctttgtccgggccattttccggcaggatcacctccaacagcagttcatggcctgacttgttacaggcctgccagacctcgagcagcagggcgtcctgctctgcacgcagcgccgccgggtcgtccgggtgatagaagaccaggcatttgacgacatgctccagcggccagtcgatcagctgcgagccgatgttgccatgctccagacgcagcggtcgcgagctgggcagttcgatagggcgcccgatccaccagcccttgccggtaatggcgttgagcgcacgctggccgtaggtgccgtcggccagaatgccgctgcgctgatcgagacctgcctcctgcgccgccgcttcggccgcggccaacaacagcagtttgagctgcggaatgcaggcttcgtcgcgcccggtctcccgcgccagatcggccagctgtttgcgatggtcgaaggcgaaaatgcacagctccggccactgttgacggcggctggtgacccggtgcaggtggttgaggcgctcgtcgacgtccgggcgcggcaccgattcggcgcgctgcaggtagtcatcaagttcgactttggtcggcatcgccggcgcgcagccgtggcgggagaccaccagcgccccgcaggcgttggcgtaacggcaagcctgctcccagccttcgtcgttgagccagccgcgcagcagacccgacataaaggcatctccggcgcccagcacgttgagaacctccacgcgcacgccctgctgcagcggcacctggtcccagctgtccgggatgtcgccttccagcaccacgcagcccatcggcccgcgcttgcagacgagggtggctttggtggcattgcgcacatttttcagcgcggtcagggtatcggtgctgcccccggcaatatgaaactcttcttcggttcccaccaccaaatcgaacagatgcagcacttcctgcagctggctggtgaccggtccggactcaatgaaacgggtttcgccatcgccgagcgaggtgagcccccacagcaccggacggtaatcaatatccagcgcggtacgcaggccgtgacggcgggcgtactccagcgccttcagcaccgcggcgcgggtgttggcgtgcgacaggtgggtgccagtcaccgccagcgcccgggaggaggcaatatactcctcgctaatgtcgtcaggcgttaaggccatatcggcgcagttatcgcggtagaaaatcagggggaaggtctcctgatccttaatccccagcatcaccagcgcggtcaggcgagatttgtcggtaatcagatactcggtatccaccccggcgcggttgagcgtttcgcgcaggaaacggccgttgtgttcatcgccaacgcgcgccagcatggccgatttcagcccctgaatcgcggtgccaaaggccacgttgccggaggagccgccgagatatttcgcgaaactggcaacgtcttctagccgcgaaccaatctgctgggcatagaggtcgacggccacccgacctatacagatgacgtcgagccgctttactgctgcattcatagctaggatttcctttttggtgtctgctgcctggaagggtcgggatcccgacgtcgactccgtgaacagcctgagggttattggttacccttagtttgagaaataaatatttcatttgcaaactcgttcgaaattaaaaaaccaaaagtgtgagggatctaccactctgccgcactgagcctcgcgcgagcgcggatcgccccctctgtcgacccgggggaaaatgaaacgccaaatggcatccatttacctatgatttttaaggggatattgccgtctggtgcggcaaaaaaggccccgaaaacgtgtctggaatgtaagtgaaacgtatgaaatgggtagagagtttgatccttctcgcaaaatgaaatatttcttctgtatttgtatttaatgaaaaaaatgtttgcctataatccacaggtattccagtgacgtgaacgacggccccggcggcatcggcgcgacgccacacacaaatactgaacaataaggattgtgcatcatgggcaaactgagactgacaacggcgcaggcgctggtgaagttcctcgataaccagtacctggaagtggatggcgtagagctgaagttcgtgaaaggcattttcgcgattttcggccatggcaacgtcctggggctggggcaggcgctggagcaggacagcggcgatatgcgcgtctatcaggggcgcaacgagcaggggatggcccacgcggccaccggttttgcccgccaggccctgcgccggcagattatcgcctgcacctcctccatcggtccgggagcggccaacatgatcaccgccgccggcaccgccagcgccaaccgcatcccgctgctgctgctgccgggcgatgtcttcgccacccgccagccggatccggtgctccagcagattgaacagagctacgatctcagcatcagcaccaatgacgccttccgcgcagtcagcaaatactgggaccgtattacccgcccggaacagctgatgagcgcctgcatcaacgccatgcgcgtcctgatcgaccctgcggaaaccggcgcggtaacgctgtgcctgccgcaggacgtgcagggcgaagcctgggattacccggaatccttctttgcgcgccgcgtgcaccgtctcgaccgccgcccggccagcgccgcgcagctggcggacgccgtggcggccatcaaagccagccgtaaaccgctgatcgtctgcggcggcggggtgaaatactccggcgcgggcgaagcgctgtcccgtttcgccgagcgctacggggtgcccttcgccgaaacccaggccgggaaggggacggtggtctcgtctcaccccctgaacgtcggcggcgtcggcgagacgggctgcctggcggcgaacctgctggcgaaagaggccgacctggtgatcggcgtcggcacccgcttcagcgattttaccaccgcctcgaaatggattttccagcacccggaggtgcgtttcctgaatattaacgtcagcaacttcgacgcctggaagctggacggcattgccatgctggcggacgcccgggaagcgatgaccgctctcgacgcggcgctggcggacagcggctggcaggccggctggggcgcgcagatcgagagcgtgcagagccgtcagttaaaagagacccagcgcgtctaccaggcggtgtggcaggagaaatcctttgtgccggagatcgacgatcatctcgatcgcgaatcggtgtatcgcgagttccgccagatcaccgactccaccctgacccagagcagcgttcttggggtactgaatgaaacgctgccggccgaggcggtgatcgtcgcggcggcgggcagtctgccaggcgatctgcagcgcgtctggcgcaaccgcgcggaaaacacctaccacgtggagtacggctactcctgcatgggatacgaagtcaacgccgcgctgggcgtgaagctggcgcagccgcagagcgaagtctactccctggtcggcgatggctccttcatgatgctgcactctgagctggtcacctccctgcaggaacgggcgaagatcaacgtcgtgctgttcgacaacatggccaacggctgcatcaacaacctgcagatggagcacgggatggacagcttcggcaccgagttccgctaccgtcagccggaaaccggccagctgcagggcggcctggtgccggtggacttcgccaccatcgccgccggctacggctgcaaaacctggcgcgtcactactctggacgaactgcgccatgcgctggacgccgcccgtcgcgaaacggtcagcaccctgattgatattaaagtactaccgaagaccatggtgcacaaatacggcagctggtggaacgttggggtcgcccagacggcgctctctgagcggatccgcaaggtggcgcaaatgattaatgaaaagcgcgcccaggcgcgtgattactaaaacgaacctctaccctgaatcctacagacttacggagaaaaccattatgtcgctcaaattaggtgtcatcggcgctggcgctatcggtaaagaacacatccgtcgctgcacccaggttctgcagggcgccaccgttgtggcggtgtctgatatcaatgccgacaacgcccgcgcggcggtcgcgctgccgggcgtgcaggcggaagtctacgccgacggccacgacgtgattaacgccagcgatgtcgatgccatcctggtcacctcctgggacccgacccacgaagagtacactctggccgccatcgccgccggtaagccggtattctgcgaaaaaccgctggcgatgaccgcggaaggctgccgccgcatcgtcgatgccgaaatgaaggccggccgtcgtctggtgcaggttggctttatgcgcccgtacgacgaaggctatctggcgctgaaaaaagtgatcgacgatggcgatatcggcgcgccgctgatgctgcgctgcgcccaccgcaaccagtcggtcggcgagaactacaccaccgatatggcgatcaccaacaccctgatccacgagctggacgtgctgcgctggctgctgaacgatgactaccgttccgtgcaggtgcgcttcccgcgctccacctcgcacacccatgcgcgcctgaaagatccgcagatcgtctcctttgaaaccaaaaaaggcaccctgatcgacgtcgaagtgttcgtgaactgccagtacgggtatgacatccagtgcgaagtggtcggcgaaaccgggattgcccgtctgccggagccgtcggccgtccagatgcgcaagtccgccagcctgtcgaccgccattctcaccgactggaaagaccgctttatcaaagcctacgacgtcgagctgcaggcctttatcaacgacgtcaaagccggccagctgcacggcccgtcggcctgggacggctacgcggcgtcggtggcggcggacgcctgcattaaagcgcagggaaccagcgagccggttgaagtgacgctgcctgagtgcccggcattctacaaacgttaagcgcgttttgctgacggaacttctttgcacaggtaacgacgatgaaaattgcctttgatgtggatgtgattaaggacctcgggatcacccgcatggtccatcaggtagcggagtggggctacaagtacattgaacagtcgccgcacccgcagattaacccgttctacaagcacccgcgcgccagccgggagatcatggcggagtacaagcaggcgctgcgcgataccggccttgagctgtcgtcgtttatctgcgtctaccgctggtccggcccggacgaactgcgccgtcaggcggcggtgaaaaactggaaacggctggtggaaattgcggtggagatgggcgttcaggtgatcaacaccgagttctccggcgatccgaatcagcctgagatctgcgatgaaatgttctatcgctcaatggaagagctgttgccgatttttgagcgggaaggcatccgcgtggagatccaggcgcatccctgggatttctgcgaagagaacaatgaaaccgtcgatatcgtgaagtcgttccgcagcgataacgtgaagtacgtctacagcgtgccgcacacctttttctacgacaaaggcgtcggcgacgtggcgagcatgctgcgctatgccgggagcgatctctcccatgtcctgattgcggacacccgcaatcatacgaaacattgccgctatatcgttaacccgccgggcgtggatgccgtggtgcaccagcacgtaggcgtcggggaaggggatgtggatttcgacgcgctgttccgcactctgcgcgaaatgaaattcgccgagcagaccttcaaggtcggcggggagccgattgtcgccacctcgctgtttggctacccggaaaaaatgaaataccaggcagtggaaacccgtgaacttattgaacgtgaattgctgcgccgctaaggcgcagcggcaggagccctactatgaacaaagataacgtcaaactggctatcgccccaatcggctggactaacgatgatatgccggagctcggcagcgaaaacaccttccagcagatcgtcagcgaaatggcgctggccggctttaccggcagcgaagtcggcagcaaatatccgcgcgacccggcggttctcaagccgatgctggatatccgcggcattcagatctgcaacgcctggttcagcacctttttcgccaacggccagcgggaaaaaaccattgatgaattcgtcaatcacatgaacttccttcatgcgatgggcgcgaaagtgattggctgctccgagcagagcggcagcatccaggggctggataaaccgatcctcggcgatgcgaagccgtgcttcagcgacgaagagtggcagcgggtggcggaaggctacaacaccctcggccgcctggcggcggagaagggaatgcaggtctgtctgcatcaccacatgggcaccggcattcagaccaccgcggaaatcgacaaatttatgtcgctggtggacgagcgcgtcttcctgctgttcgacaccggacatgcctggtattccgaaggcggcgaagcgccgatgctggcgatcctcaaaaagtatctgccgcgcatcaaccacgttcacctgaaagacgtccgcccgccggtgattgaccaggtgcgccgcgacggcctgtcgttcctcgacggcgtgaaaaaaggcaccttcaccgtcccgggcgacggggtgatcgatttccgtccggtgttcaagctgctggacgactttggctataaaggctggatggtagtggaagccgagcaggatcctgctctggccaatcctttcgaatacgccgtcaaagcgcgcaaatatattcgcgaaacggcagggatctaatcgttgtgacattttcaggccataccgggtatggcctgcttttttcctttcacaaccggactcagggcttaaccacagcgccggacagttccctctccctcagggagagggccagggtgagggtgaggatgacgggtaaagcgtcacttcacttccgccagcgcggtcttatccacatacggtttcatcagcgcgtcggcttccttctgcgccgcctgcaccgccgcttccggcgtcactttggcatcattgaccaccgccgccagctggttctccatcgccttacgcaccgccacggtctcccaggtggagtaccacggatgggcgtacttcagctgctcaagggcgatcgccgcccgcggatcctgctgcagataggccttcatctccggcgtatcgtatgacgccttgcgcggcgagaagtagccggtgaagcggctccacgcgccgttcacctcggggctcaccagataggtcaggaactgatacgccgctttcttctgcgcctcgttgatgcctttaaagctcaccaggctggcgccgccgatcggcaccgcgcgctgctctttggccggcagcatcgccaccccaagctcaaaatctttgctgttctcgcgcataaagcccagcgcgccggtgctgagcatcgccatcccgagcttgccggagaagaacgcggcgctgatctgcttcgagttcagcaccccggacggcatcaccttgtccttgtagatcagatcctgccagaagcgcagggcgccgatggcggtcggcgagttgtaatagacctcgcccggatagtcttcgttaaagtatttcccgccgttggcgcgcaccagcgccgagaagatccagccgccgtagtcgtcgttggtcgacggcagcatgatcccccactggcctgtgctctcgtcggtcagctttttggcatcggccagcagctcggcccaggtctgcggcggctgtttgatcccggcccgatcgaacatcgtcttgttgtagtagaggatcggcgtcgagttatggaacgggatcgcataggtggtgcccatcacctgggcgttcttatgcatcgcgggccagaattccttttgcagaaaatcgccggccttttgatcgccatatttaaacagctcatccatcggcaggatcgcatccttcagcgccagatcggtggtgaagttggcggacatgatcaccagcgccggcggctggccggccttctgcgccgattcggctttgatcttggtggtgtcgtagttgccggtgaagatcccgcgcacttcaacatcctgctgcgagtcgttgaattgcttaatgacgcgggtcatctccatggtcagcttgccgtccaccggcgccgggaacatgaagtctattttctctttcgccagcgccgcgccgctcagggcgaggctgagcccaaccgcgactagcgtgaggggtttaaacatgatctgtctccatcagtaagcacctgtccacaggctattttatttgccagtttggccctgggcagtgctcagaatcctcacgtactacgtgtacgctccggttcttccgcgctgtccgcgtccaaactgactgcaacaattacgcctgatgtaccggcgctaaattatgctgggtctcagcatgaaaaagatgcacatcggcaggcgaaaagccgatcggtagcgactcgcctttctccggcaccgtgccgcggtggcggcggctaaagcgcagggtgccgatcggggtgttgacgtggagcaggtaatcggcccccatcagttctcgttgcagaacggtggccggcaggcgcagatggccctcttccacgcggtcggtaatatgttccgggcgaacgcccagccagacgcgggtctgatcccggtggcgcggcggcagcggatggcgttgttcgccaagctgaacgttgccgtcaacgcaggggagcgatagcaggttcatcgccggcgaaccgataaatccggccacgaacagattggccgggttggcatacagatattctggccgtcctacctgctgcacgtggccgccgttcatcaccacgatgcggtcggccatcgacatcgcctcggtctgatcgtgggtcacatagatggtgctggttttcagctgctggtggagcgccataatgctgtcgcgcacttcgctgcgcaggcgggcgtcgaggttggagagcggctcgtccatcaggaacagccgcggattgcgcacaatcgcccgggccatcgccacccgttggcgctggccgccggagagcttcgccggtttgcggtcaagcagcgcctccagctgcagcatctgcgccactttatccacccgcggctgccagctgcttttctcttccttgcgcaccttcatgccgaaggtgatgttgtcgcgcaccgacagatgggggaacagggcatagttctggaagatcatcgcgaagttgcgctcgcgcggcgtggcggcggtgatgttctcattatgcagccagatttggccttcgctgaccggttccagccctgcgagcaggcgcagcagggtgcttttcccgcagcccgacgggccgaccagcaccacgaattcaccttcgtgaatatccagcgacagggcgctgagcgccggtttgccgtcgaaacgtttactgatgttttgcagactgagcatggcggttagcgctcttccgttgggcaactgatgttatcgtcgtacagccacggcccggcgtagtgggccagcgagtgctggtagctcacccactgctcaccgacctgacggtgcatcaggcacgaggccggagagaggtcgtaatagggccgggtgtcttcgtggcagtacggcacctgatgaacggtgccgggaatggtggagatcagcgcctggcgatactgggtcatggtcaggctgtggttgtggccgcagaagatgcgcgtcagcgacgggaaacgctccaccagcgccagcagacggtggccgttttcgcaggcgatcgggtccatctgcgcattgcccagcggcagcggcgggtggtgcataaagatcgttgccggtttgtcgccgccctcgaacagttgcgcctccagccagctgatggtctcgtcggtcagccagccttttgacgtgccggcatgactggagtcgataaacagcaggcgggtggcgaagtcatccaccacatagcgcatattttgcggatcgttgcccagctgcgggcacagcgggtgaagatgctccagaaaatgggctttgtcgtcgtggttgccggggatcagatacagcggatagttcaggctgccgaggatctggcgggccacctgatactcctccgggcggccgcagttgacgatatccccgctcaccaccaccgcgtccgggcgctcgcgcagcgcgttaagctgggagaccacgtcggcgttggcggcattgacgtcgataaagccgtacagcttctcgccgcggctgcggaaatgggtatcggaaatgtgcgctaacagcatgaatcactccttatttgatcccggagaagccgaagctccgcaggaactgtttctgaaaaaggatgaacgccagcatcagcggcagacagaccatcagcgtcccggcgccgatggtgccccactggccgccggattcggcgcccatggcgaaggagaccagcccgacggtcagcacctgcttatcgggatcgttgagcatcatcagcggccacaggtactcgttccagtggtaggtaatgctgacggtggcgaaggccagcaccgacggccaggacatcggcagcagcacgcggaacagcacctgccaccagcggcagccctccatcagcgccgcctcctccagctctttcgggatggcgaggaacgcctgacgcatcaggaacacgccgaacgccgaggtgaagtagggcatcatcaccccggtgagggtgttgagcaggccgaaggttttcagggtcagcatgttcggcaccatcatcaccaccggcatgatcatcagctgcaccaggaacaggagaaacagcgtctgcttgccgcgaaactcgtggcaggcgaagacgtagccggcggtggtgatggtaaacagctgcacgaagaaggtgccgaaggtgaagataatggtgttggcgtacaggctcagccagtcggcgctctgccaggcgtcgcggaagttatcgagggtcagcggcaggcgcggcagcagcgacgccatatcttccccgaaggtggtggcgctgaacgaggtggccagcatccagataaacgggctgatccacagcagcgccaggcagcacattaatactgtaagcgtaaagggcgacgagcggcgcaggcgcaaccatagtggacgggcggcggcgggcgtgcggaccagcagcggcgagatttcagcgctcatagtgggctcctttctccagcagtttcaggttaatcagcgagaaggcgaacagcccggccagggtgaggaaggtggcggcggaggctttgccgaggtcgtgggtatcccaggcgagattctggatgtaatagagcagcacggtggtggcgttgtccggcccgccgcgggtcatcaccgccacgtggtcgatctgggtgatggagtagatcagcgcggtggtgatcacaaagctcagggtcgggcgcagcagcggtagcgtgaccttaaaaaagacctgcgtgcgggtagccccctccatcagcgccgcttcccgcgtcgaggccggaatgctctgcagcccggcgaggaaaaacagcatgtagtagccggcgaacttccacacgccgatcagcgccagggccagcagcgcgctgttgctgcgccccagccagttgttgttcatcggcccgaacagctttgccagatagtggtcgagcaggccgaggccgggcataaagataaacagccacagcgcggcggcgctgaccatcgggataatcatcgggaagaaaaaggcggtgcgcagccagcggttgacgcgatggttctcgctgagggcgaccgccagcagcagggcgagggtcaccccgggcactaccgtcagcaggatatagagcaggttattgcccagcgactgccagaagacgttatcggcaaacaggcgggcaaagttatccagcccgacgtactgcgcgccgtcgctggccatgcgggtatcaaacaggttgtcatacaccgaacgccccagcgggaaccaggtaaacagcagtaaaaacagcagggaaggcgacaggatcagccagggaagccaggtctttctcatggtgacgcgcatctcgttcagccatttatcgaagcccggattgtgggaagcaatgactacagaggcatggcggggagatgacggtttgatgaagcgacggggaaaacgccgggcgagcgggccgcccggcgggagagaatcatcagaagtcggctttcagcaccgcgcggtagcgggctttgccttcgcgaacgtgcttcagcgcttcgttaatttgcgacatcgggaacagctcggtggtcggagccactttgctgcgcccggcaaacttcatcagcgtgcgcagttcggacggattaccggtcgccgagccggagatgctgcggtcgccgccgatcagggtaaaggccggcaccgggaacggcctcatcaccgcgccgacggtatggaagttgccgccgtaagccagggcttcgaagtacggctgccagtcgaggtccaccgccacggtgttgatgatcaggtcgaactgaccggccagcgcttttaaggcttccggatcgcggctgttgaccacgcgatcggcgcccatcgccagcacttcctgctctttggccgggttggagctgaaggcggtcacttccgcgcccatcgcccgcagcagcttaatggcgatatggccgaggccgccgatgccgatcaccccgacgcggctggtggcggtgacgtggtgggtcagcagcggtttaaagacggtgatgccgccgcacagcatcgggccggcggacgccagatcgatgctctccggcagggggatcacccactgccagtcggcgcgcagcttattggcgaagccgccgcggttgagaatggtcggcaccgagccttccagacagttgatctggttgccgctgatgcaggcgtcgcaatggccgcagctgcgcgccgtccagccgatgccgaccttctggccaatcttcagccctttatcctgagccgcgctgcccagcgccgccacccggccaatcacctcgtgaccggccaccagcgggtagctcgacatcccccattcgttgtcgatcatcgacaggtccgaatggcagatcccgcagtattccacttcaacttcgacatcttccggctgcagctcgccggcatcgtattcccacagtgacagatcggcgcccgcttctttggcggcgtagcttttaatgatgctcatgttcatttccttggggttggcgtgataacccagaaagtgtagagcatggtattccccggcgcttggcaatcggaggggtcgcgaagcgggcggaccagccgcccgttaaggtcagcggctggccagcggccactgattaaggcggatgccgcgctgcggggcgttctcggcaaaatcatccagcaccgcccgcacgtccgggtcgagatagccgacgctgtcgtgctcgacgatcaccacgctcttttccggaatcttcgccagcagggccagcagatgcggattgtgcataaaggtcagattctgctggatgcgcagcacgtagtggtcatcgtagcgcgccagctgcagcgagtggcgatggctgcgccagaggctgaacgccatctgggtggcaagaccaatcccgatccccgccagcatgccgcaggcgataatcccgccgatggtggcgaggaacggaacgtactgcgccgcaccctggcggaactgctcgatgaacagccgcggcgtcgccagcttatagccggtatacagcagcacggcggcgaggctggcgagcgggattaaggtcagcaggccgctgaaccacaggccgcagattaacagcaggacgccgtggataaagatcgacagcttgctctgcgcgccattgctgacgttcaccgagctgcggacgatcaccgcggtgatcggcatcgcccccagcacgccggagagcagattgccgacgccctgggcgaccatttcgcggttcggcgaaggcggcggattttgcggacgcagctttttcagcgcctcctggctgagcaaggtttcgaggctggcgaccagcgccagggttaccgccaccacccacaccgacggattgcgccacgcgctccacgccggagattccagctcgcccagcagatcgccgaggctgccgaacgccggcagggtgatgcgtggcagagtggcaagctgctgcggcgcggcctgggtcattaatacgatggtgacacaaccgagcaggacagcgatcagcgggccggggatccagcgtaggctcttcacccggcggataagcggcgaaccccacagccagagcaccagcaggccgcccgcggcgacggcgatagcactgagggagaaggtggcgttacccttcacgatatcaacgagcccggtctcttctgcgctgccgagcgcgacggggatctgctgcataatcagcaggatgccgatcgccgccagcatgcctttgatgacgctggcgggaaccagcgagataaagcgcccggcccgcaggatgccgaacagcagctgcagcgcgccggccagcaacagcgccatcaggaagagggagaaggaacccagggattcaatggcggcgacgacgatggtgaccagtccggcggcggggccgctgacggcgaagcgggaggggctgagggcggtgacgaccaggccgccgatgatgccagtcagcagcccgacgaagggcggtaagccgctggcctgggcgatgccgaggcacagcggcagggcgacaaggaagacgacgatgccggcgagagagtcctgacgaagcgtgttcatggggcgtgctcctgcggtgagaggtgttcgacgagggtggttaaatggccggaagccagatcgtagacgcagccgtgcaggctgagcggtcgcccgctggcgagcaccgtctgcaccggttcactctccagcagacgggcgaactgggcgcgaacgttggcttccaccagggcgtccagcgcatggcgagaacgctccgcgttggcgctggcgctggtgctggcgccgggggaggccgcaatacaacagtcatcggcgatctgcgcaatttcgtgatgcagggtgtggcgcagctggccgatgcggcgagccagcgccgaggactcctgcgccagcggcagggtgggcagagagagcgccgcctgcacgccgccgcagccgtagtggccgcagagcaccacccgctccacctcaaggtagtggagggcatactgcaggacgctcatgacgttgtcgtcggcgggatcgagcatgttggcgatattacggtggacaaagagctcgccgggctggctgccggtgagcacctcggcgggcacgcggctgtcggagcagccgatccacagcgagtggggccgctgcccgtcgatccatttttcgaaatagtccgggtcatgctgacatttctgcagcgcccagctgcggttgcgggccagcaaaggttttaacgtcgtcacaagtattctcctgagttaattcatcgagtgaatatgtccatcaagactcgtacagcgactagtaaaaatagtgtttaccggaacccttcacgcctgaggaaaatcctggaataaacggcaaaaagaaaacttttcattaatgtaaagttataaaaatattgatgaaattaatgttttgccgcggagcggatggataacaaaaaggcattggctaaaactttctggaatatnnnnnnnnnnnnnnnnnnnnnnnnnnnnnnnnnnnnnnnnnnnnnnnnnnnnnnnnnnnnnnnnnnnnnnnnnnnnnnnnnnnnnnnnnnnnnnnnnnnnnnnnnnnnnnnnnnnnnnnnnnnnnnnnnnnnnnnnnnnnnnnnnnnnnnnnnnnnnnnnnnnnnnnnnnnnnnnnnnnnnnggtttgcgggaggggcggtggtgatggggcgccctggaatagcggcaaaaggtgacgccgcgcaggatagcgctgtttttttcaacacttagcgcaatgacgacacgctgtcgcttgcatgaccgccgccgacaggtataatccagaacgtttccgcatccccttcagtgccgaagtggcgaaatcggtagacgcagttgattcaaaatcaaccgtagaaatacgtgccggttcgagtccggccttcggcaccaagtgatgcaataattagctacctaagggtggctttttttgtgtcttgatttctatgcaacttctgaaaacctgatagccgtgtagtttggatgggatcgaagcgaaagttgtataaagtagtatttggtgccttgttcttgcaaaactatgatgacttaattataccttcattggatataaaaccgagggagagtcatcgatgatgtcatttgatacacatgctgctatggatatgatcacccactcaacgggggggtttagttatgatactcttgccagggctttgatttctaataaaaaggccaaagcaggtggatgtttgttaaaagattgtcaagaattttgcgaatatttagaatcccagggagttatcaaacgtaatgccccgtgtgatagggatgaagatgtttattatgagtattctccacattaattgaattcgtgataggttacgataaaagttttttacctaattaggcttgcaacgaacccctacatacggtagctttgcggggggattcttgagggtaatattgtgagccgactaaatctgattacaagttgcactaatagcaagcataataacggtcattcagtactgaatcttgccatcttttctgaaaaatataaaacgccgaaaggtttgattcatgcctggggtgaggccgtaaattcggctctatcgacgaagttagttgttcctgtagaaaagttatataagggggggcattggtcaacggcaatgtcaatatatgacgctcaacccattgaattatgggttctttcagctggttttggactgttgaaacatggggatgctatagttccttatcaagcgacatttgctacaggacataaagattccatacctcttttttccgataaatatggaaagaaatcctttcatcaagaatggtggggaaaattaaatgaagcatccccattaaaaaaatctcatcctgtatccttatctgacttaatgatggataagtccgatgagtattttattatctgtgcatcacctgattatataaacgcaataaacatggatttaatgaaaggcatctcttacttaaaggatgtcgatagacagttaatcattatatcttcttcgcaggctaaattttctttgaaaaaaaacctattggtaagcaataaatcaatcgctgagttttttaacagtaatatgcttatgttaaatattaaaatagctcagtatgtaattgaacagtttatgagtatggatgatggccatttagggttgcttgctgagcgtcttcgttcaacattttcagtactgcctaaaaagcatactgttcgcggggtgcgcaggagaccagaagaggtaactatttggatttcttcgtatatacatgcaaatccagatggaagtgcttcccgggcacttcggtcatttcgtgatcaaggcaatagttttgaagagaagcggtttcgaacgctgtaccaggcagttttgttgactaatcgataatgtcgcagcaataagactatgctaaaatctcacgttttttgacagtaaaaggcgtcacaggagatcagtgttgtcgaagctaaagtattttttcccggatagtcaggattttatcgatcctagtttcgacttccttcgagaaacgcgcaatgaacatcgtgttcgccagcgtgacgacctctatccgcatgaggttttcccccacccttatgatggaatgctagtttcgaaagcggttgtagatggcttaggtcgcggtgaaagtaaatatacgcgagcacaacgattacggtacttccggaatggaatgaaacatttctttcgtttgccagagacgatgcaaacaatgggagactgtggtgcatttacttatgtaaatcaagatgttcctccatatcgcgtcgaagacgttattgaattctatgaaacatcccgctttaactacggggtatcacttgaccatatcatttttggctacgaaaaaccgggagaatctttctcaggtgaggtgctggcagaatgtcgtcgtcgccaggatatcaccttgactctggcgcaggattttttagttaaatcgcagaagagttgcttcacgccctttggcgttgcgcacggttggaacaaggcatcttacagacaatcagtagaagcactgctggctatggggtataagaatatcaccatgggggggatggtgcccctgaaaacggcgcagatccttgaaaccttggaagagattaaaccacttctcaaaagtgatacccgggttcatctgcttggtattgcacgtccggagagctttacggatttcattcgtcttggtgttaccagtatcgactcaacaaccccccttcagcaggcgtttaaagatcgcaagaataactaccatacgcctgagggacgggcttatacagctgtgcgtgtgccgcagttcgatgccaaccctagtctcagtcgtaagataaaatctggcgttattgaccaggatgtggcgcgtcttctggaaaaagatgcgatgcatgccttggttgaatacgataaagacgcgttgtcgctagaaaaagttctggaggctgtaatggcctatgaacgtctacactcgggtgaaaaagaagcggagaagatccgtgccgattacgaacgtacgcttgccgaccaaccttggcggaagtgccagtgcaatatctgcaaatccattgggattaacgtgattattttccgtggcgccgagcgtaatcgccgtcgcggattccacaatattcaggtgctgtacagtcgcttgcagcacacattgtcattacgctcagaggattaatcatgagtgagtttcgtgtccccgccctgcgtattcgtcagggtgagaagagacagctttacagcttggccattgaaggcaaacaaatcagcaaaattgctgcgatttcacgcattcgacgcggagatgagaacctggttggttatcagcgtccggaagtacgtagccatattaaggaaatccagcgctatattgaaagcgcgaatccgatgatccccaaccccgtcattatcgctttcgatcagcgcgtacgctttgaaccgctgctggaaaacagtgatatggggcatctcgttattccgtattctgaggaggcaaacttcgacaaaccggggtttatcgttgatggacagcaacgtacagctgcgttaagagaagcggacatcaactcttttatgatgccggtatcggcatttatcgccaatgatgcagaagaacaacgcgaacagtttatgctggtgaactccaccaaaccgttgcctaaaacgctgttgtacgaactggctccgcatacgcatggccgcttgccttccgatctgcaactgcgcaaattcccttcactgctgacacagcgtcttaactttggtgaggggccattggctgggcgaattaagactgcgaccaacccggacggagtgattgctgacaactcaatgatcaaaatgatcgactctagcctacgtgagggggcgttgtatcgcttccgcgattcggcgactggtttgggcgacgaagcgaagatggtgaagctgctgaataacttctggtcagctgtagaaactgtgtttactgacgattgggataaaaaacctcgttactctcgcttgttacacggtgtggggattcttgctctcggtagcctgatggatgaaattgatcaagtgcatcaggagtacaaaggggaaccaggatggaccgagatcccttcctattcccgttttgtcgaagagttacatcgtatcaaaccgctttgcgcatggagcagcggtgtgtggaatttaggcacagatattgatggtcagcctattgtccgtaagtggaatgaagttcagaacctgtcgaaagatatatcgctggttactaattatctggtcacaaattatatcaaagcggcgaacgcaaccatttgaaaaaggggcgaaagccccttatttttgtctatgagctcatgaaccaagtcgtaatgcctgagggaatttatcctgtaatattcatggcatgttgaacacgggcgatgaatgcattcagaattgaacccgctcctttaccttcagggtaaataagatcgcgtcgatacggtgttaccgcatacagagcttgatgtttcgcgcttgaggcagcaaaaataaagtaatccgcctgttttgccaaattgactaacttgtccgtcgcggtatgatcatgattcacatctactttgattccctggaacaacgtctcaatcatccctcttgctcggcgcgcagcgccttcagtcaaggtataaatggcgacgcgttttcctgcaagattcggaagtgtctcaaactcactgtcatcacttcgtggtggttccggcggaaacgcagaatcggcacccctgcccaatacgtcgatggccagattacgcatgatcgtgcgggttgagtgatctagacgcggccacacaccaacagcacaagcttgaatattcatccacagagcgtttctaacctctttatcgtgttctggtgcatccaggaacagttcgatcatctcgccaagtgaagttatatttttaagcgaaccgcagcgttcaataatgagttgcagtgtcgcaacaaattcctgatagtcagtccgactgagagaaccttgaaggaaatgctccgttgctagcgtcgccagttgaatatctgccggactgacactttgttccatcgccagaacatccatccatttaagccaagttgagctcattaaaagcacttggtttttcctcagccagttaatgaaggccggcatagcattacgcagggtgggaaatgcctgtggcggaatattctgtgacagtaggcgaatgaatgtggattcttggaaggaggaggtggaccaatgttcgctttccagagcgacaatctgcaacagtgcatttccatcagcgttgggattgcacagatgtgagaaccaactatcccagccggagatatgagtggtagtaagccgttcgatactttcaatcagcgttataagtagtggaactttctttgcttgatctagcagttgtatatctatgttgcggagtgtgtcggcgtatgaattcagcgtgtcggttgttgccgtcagcgatgtttgtagataagaggccagtgattctagcgatgtaggaggcaaagagaatgagactggagattgtgtcgagatatcgtacctaattcctctaaggtcggcccactgctgtaattcttttagccagttggatttcagcgcttttggcagggcacttagcagggttggttcaccggctagcgccactccgattgcccaagttttccagatgttaagctcttcctcttcgtatcccagcagcggaacctgcataaagagcggatgtagagaaaggaaagcggggcgcaatactgagggggcctgctgcgcgtagctctgcatatcataacctaaatagcggttctgataagcagtgagcagcattctaaccagtgaagtaggaatgcgtcctctgatcagttcggggagatctggatggtttagcagggagtcccatttctgccatttcccagcctgttgaagttctagcaacagcaaattgcgtttagacagcagaccgttgtcacgtagttcctgtagatagctgtcactggccgctatctcattttgattcgttgccaacatgaaatcgctaaggatacgaccaaacgggcgcttgcgggtacgaacaagcgatggacgttggcgaaataacgtaattacttccgtcagtgcagtaaaaacccgcattttcgccagtttatcatcacgtttggcggccaacaattcaacacgaataaaccccgttgggcagtgctccaacagtatggtttccacggtgagcgtgggaccagaagcgggactcaggtaaatcctgcggtcaggttctacatcagcagaaccgagtcgggctccgatgacgttactgagttctaacagagtgcgctcatcttccgccatcgcaaagaaaacccagtttttgcggtcacaccacggcagaataatgggccattcgccatctcgtgcgctatccaccaaaggtagcagggcatttttttgctcttctggataagcaccaggtccgtcagtcagtaatttttcgaggctgagcaaattgccttcgccgaaaaaggctcgaagccaggagggaacattagtcatctctgtctccgaatgtatattgtccactgagctcaattagtgtgtcagaaataatggttttattggtggagaacagcaaatgttcatcattgaggtttgcaccactccaggtgtagttcatcgaacctctcaagaggaagtgctttgttaacatatccttagcatgcaagttctcatggtatgtgtattgcacatcatgatccggagagagccttgccagcagtcgttcaacgaacactttgttacgagtatcagggcgagtgacaatcctgagtggacagccgttatttgccgctgtagcaagcaattcctggaaactgatcattctggcaccccacgatgggtcaagaaaactccattggccgccgcgattatcaatgatgtcaaaatcacttatccagggcgagatcaaccagatgagttctggataaaggattagtccacagaactgtgcgctcagtacttccctaagttgtcgctgtccgagaggtccgtggagaaatatttgtcgttgctcttccattcattgctttccttactgcagggcttcagctagttcgattcgcaacacgatgttaccaccccgatagtctacggctcccattcgtggatagagatgcaggccgaaataatcgataggctccagttgtagtgtggacacgatctgtactatctgataacgggtttcccgagggatcaacagttcagcaaatccttcgcgagagattgctatatggatctgctgaagccagtcgctattggtcacatcaacttgtgttgcttgctgctggaagagagtgctgagcagcaatctttctgtcagtttcggcccattatcaaagggattgtagtagctgagtactgactgacgaaggggactgccacgctgccataacatgccctgaatctggcaaaaacggtcgaaaattttggtgacgttcgcatcaggcagttcctgagttgcttgggtatgggcgaatatatttaggctaacttcataacccgctttggcctctagtgcctgccattcccgcagatactctagcaagcgccgatcgtgagaggagtggctgccagggcgaagaatacgggtatgtagcacggacataaagctgtgagaaagagcaaatccttgttttttcagctgagcacgcagttgtccgttcgctgttcggcgatcgtgatgactttccgccatgcgcaaatcgttcagcgcattctgtaatgtagtgcttgaaggaagtcgagagagtagttcgaaaagatcatcatctatttgctcgtaatcgctggcggcgaaactgcgtataaacagatttagcagggcgactggatcgctgtggaacgcttcttcgaggcgggtgataattccacagcccccaggctctgattctgtgagccagatatcgaggtgctcgccatcaaaaacggcgtcaacaagcaatcctttgtcgtccacatctggtagcagtagatggccggtctgttttacggctccggagaaggtattgatcaacaaggtctgaagccactgacaaaatgaataactctggctgagatcttcagtaaacacagcactatgcgtatcaagcatcgcgagaagctgcggctcattgaacaggcttctcaactgctgctgtaactcttgacgttctgcaataccgttaccatcatcgtcgttttcaaagatattttcagcctggaatagtgaatcggcaatggttgccagcgactctctaccgtccggcgtgcgcagggcatgaattgcatcggcgacggtattgtggctgacgatctctttagtcagtgccgccagatagcactcgtagatccagtctgcagtgaagctgtcatgttcgaaacgcgcctcactgctaatgcggtgatggaaatagagcgtcctgagcgaactggctaatttggcgtcgttcatgacctgctgatgtagcgtggaaggcagggtgaagctcagcttcagaccatccacccactgacgagtacccaccgcaaccggctgaccattctcaacccatctgaaattaacccaagcctgttgtttgcttttactgcgcagcgaagcactagcggctgtggtataacgcgttagctcaagtggtgtcatatgctgatgggtatagaacgtggcggactgcaacactgtgctccatggacctgcgggaatcgccatcgtttcggcctgagcatttgtggcaaagtgagtatgccacttcagctgagaattgcttttctcggtcagattttgtttgaaatcaagggcccgagtaagtacctgcagaggacgaataactttcattggtggcgcatccgcaagcgtaatcaaacactcaggcagccaggtatcaccaaatgcctcgttgatctcgaaatcgacttctgaaacttggtttagtaacagaacaaaattgtgtggcaccagccagtcggcttcaagatcggaataaatggcgtagcgtttggagatgcggcccggtgcaaactccttcagcccctgaataaatggtaggtattcatgttttgtaaaagggcgctcaagctggatgctcagctcaggcaaattcagctcgctgaagagggctgccggaataaacaaaggcagcggtgagcggcctggtgttctgtctgcgccgggaatgcccatcagtgaccattgggtagtcaactggcgcttcagggtcggaagtagttccatcataatggaacgcggcggtgaccacatgatgtgctgaagctgcgattcggtaatttttagcgcgtagaacaagtactgttccagcccctgttgccagacgttttgttccagcacgacagaaatcagattgagcatctgttccagatgcccgtgttgctctctgtttttgggcggcttgtttagcagtgaccagatgttactgccggggatcttcatactcagccagtccagggttgccatcgccgcctgcattttctggatgtggatattatctaatggtagtgattggcccttgatttccggtgtcaccagctcttcataacgctggtacaccacgcggtcgcggccgaattctgacaacactactatcatccaagggcgcatagttcttgaacgtccggcgcgacctttgcgctgaagataagaagcgacgttacgcggtgctttgtgctgaatcacaaccccgactgagggatcgttaaagccaacttccagcgaagctgttgccacgacaacttcggctttggggtccaccccggtgtcctgactggaggtacgcgctacgatagcccgatcggaattatcaagcgggtgtccaatatcaatagctattcgccagttttgaccagcaagggtcagcgcattggatacaccgttgcgttcgttacgctgagccgccagcgggggctcgttgggcacaagttgcttcccgcgtgtacgccatccctcggcgtcgcaaagttggtgatagaggcgattattgatatccagatcgtcggtaaagacgaaagttttacggccccaggtgccgtgcgatgtggctttgcgggtatccattagtcggcgcgccaacatgctggtctggatggtggtagagagcaaggccgtttgcgaaacagggtcaccccgcagtgctaacaggtattcagcccctttatcctccatctcttggtaagtgggctcaattagcatgacatgttttttgttggcgcccactaagtctgcgaagaagcgttctgcgtcactcagtgttgctgagaggccgacaaagtgcgggcgacagcgtgccagttgcatccagcggcgtagcaaatatgcggtttgagcaccgctattgcctgaataagtatgaacctcatcaagcaacaccatcggcggtgcaattacatttatgcccacgccgaacaagtggttggccttgttattgccgaggtgttggttaagcatttcggtcgtggtgaacaaaatatccggtggattgttcattagtgatacacgagtgagcactacttcgtcttcacccacactatgtgtgcaatgcgtacagcggaggatctctttgccccggctgatatcttccgctttccagcgcatttcgccttggcatttaggcgtgttacagcgcagtaagtcgaaaggaatatctttgtctttatcaatgtactggatgctgtggggggtatcgccaaagaaagatccgatgcgtattttacgtccagatagttcaactgactgagcgtccacttctcggcattttccccaagtttccataaactggtctttgagtagttccttacggggatacagggccagcgtacggacccgtgctgaacgatcgcgttgcaggtcattgatgagcgaagttagtgcaggcagatagaacgccagggttttaccgctgccggtgccggcacatacgatcgtagccgttgcttctttgacgcgcgtatgattgctatggaaatcccatgctcgcaggatgcgagcagttgcccgggattgaaaaccagcaattgagaaatcaccgatcagtgctcgcaaggcttgacgcttgatgtcattcatccattcgacatcgctcaattggctcagaaccttctcagccggatacttcctttccggatagcttcgagggcggcggataaaacgataatccgccaccaacgtccgggtacgactcagttgctgaccgcgaaaccactggcgttggtgacgaaacagatgaacggattctgccattcgcgtgcgataaagttgcgtacctttagtatttgggatgctaaacaacattgcggcatcctgcagatcctgcatcaatattttgccattttcgtcgggaaaatggtgggtaaacagagacagaatatcagcatctgtaaacgcgccttccgtgtctccccagaccagcagttcggcttctcgcccttcgagtacatcaagcgccgcgtgtagacgagctaaatcctcagcaatcatgtcgctatttccttgtaatcacaaagtcttccaacatgtcttcatcacgcagccactcaaaaacttctgttgtaagtgtgctgagggttggtttgccattctgtggcccgttgattcggtcaaagaagtgttgaaccgccaaaggccagtcggttttcatcatgccgcgtaaggtgttcagatgttccgccatcgagcggatctgagtaatgctgtcgccattctcaggtaaggactgaaccagtacatcgaatttattgcgtaagtttgagtactcatcggcaatttcttttagtttgccgactttctgctgagcctcgagagttttgttgtcaacatgaatctgttgacgcaactcttgctgccactcttcccatgcgttgttcagttggccactaagtgtacggtacaggccaagtgacaggttcatgcagttggttaaggagtcattctgaatgatgtcataagccgttggctcttttgtagtagagtcttcgtccaactgtggatcgggattttcggtgctgatggcagcgccagccagagtctgatttttcagccagcgactccactgggacagcagattattaacgctatttgcagcgtttttaagttcattacgctgattttcgttccaggtaactcttaattctggcggcagacgttgcagggccgggtactgatacttcagacgactataatgcccagcgactgtatcggttttcgacagtaccacaccgcatttttcaataattagcgtggccttacttgcctgaacactcaaatcaagttgtttctgcatgtctgcaagctgttggcgtaacgtactcattcattcgctccagaggcgctgatatcagccgccagatttttcagtcgctcttcaacctgcttgcgagcattttcaagttttggcgcatcacccttactgtttatctgttgcagattaaaactgattttcgattgaatattctgccactgtgtaagcaggttgccgatgcgattgacataatcgccatccagatgggagatgtcgtgccatagcatgaagacatcctgttgtctggtgagggaattaagtgtttgcagggtatgtaggctggcttcagcatccactttcagtgcaccgatttcatccaatagccatgttgaatttctaatctgttcggtttccgctggatagtactgggtgcgaaccacttcgataaacgttttccagtcatcgagaagggcaatgaattcatcctgatttttcacatcctcaaagagttgtgcattcgcgatcgttgatgcgatctcttttctggctgtctctgccgcgcgttgtatctccgcacccagcggctcttttaggatctctttcaatgcgagggtgacaacttcggcttccaaggctcggattgaactgagcccagaactcaactcaggaactgcgacctgagaaagccacgcgtctcgcgcctcgtcccagccctgaagggcaacttgccgcgcttcagccactttaatgctggtgtgaggtttttgattagcttcaagcccgtagaaacagagagcggaaggggtagtgtctgctgtacgtcctcgggtttttccttgggttctgccaacccctttctgcgtcaggcaaagcgtatcaatcagttccgctggattctcttttcctgtcatcagtcccagcagtagtgctttttggtaatgattgcgcagtgcgggtttcaattttcgtgcgcgggcatgattaattgctttttcagtggtttgtgggacccaccaactgacaaagttttcataatggacatagtcttccagcgcttcagggtagtctcccccttgttcaagatcgatataatgttgaatacgcagtattgccagggacacgttgtagatttcgatcctacgtaacgggtcgttcagatctttacgatcgtagaactttacaatggcgttggaaggatcggaagctgaaagcggcaggctaattaacgggatacgctcgagcaacgagggcttttctaccatgccgaaaaactccgcttgggcgtagagctcataacaactgttaagtccggctcgcagatttcgggcaatatcttggggtaaaacgactttgtcgtttacccaagctttgagatgcctgataaaaggcagagtcgtattttccactagtggttttggctgtggaggagataccggtggtttaggaactatagctattttcttatcagtgtcgccatttctggttgaagtttcaggcattttgcctttgccgttcaggtgttcggctaattcattcagaccgaaagctttggcgacgcccggtgatagttgttttctgacttcatcccaggagtgacagttgtagccccagagtccggtcagtgtcgccgcgctggaaactcgatgggtagttaattggcttattttgtactgaatttcagcatccgtggtaatgcctgcaagattaggcggtgggaatgaaccttgttctgcttcaacacgacaatcccgcagaatatccaacaggatacggctaattactacgcgaggattgtaaacaagttgattgctgccgtctcgacagtatttatttgccagtgcccggatagcattgcggttaaatgggaacagcggaacgccctgtttggctgtactaccaaaatcatccagccattctggtacttcttcgtcctgccagactggaggccagtcatttaaaccttgcgctcgcgactgcttcagggctgctgcaccatgacgcgccgcgttcaagtagcgaccgcacagtgaaataatactttcttcacaactgtcgcttttatgtgtgctttcaatgctccattcatagccagccctcgttaccagcgtgccttgtcgacgtttataacctggatactcgttagtgaccgctatgaccgaatgtaccgggcagagtgttctcaccccgtcacgaacgccttcttcgattaggctatcaatcaatacgtcttcgatcgctgaaatagcagccatatcttccactaggattaccaggcggcgatcctgcgcaagtaattcacggcggatctcttgaaatagttcctgaaaattgccgccgttaaaggtgaagagcttggcaaataaagatttcagtgctgcatgcatcgcttcattcagaacatttacggcctgaactcgcgccttttcattatcatgttcatcaatacgagaatgtcgaatatattcgcgggcaagcgacgacaggtcatcaatgttgtcttggaaaaagaggtcgctaggcaccagttcgtacttgtcgtgatcctcatcactagcctttagcccatcgctcatacgactggcgcgtttgtagatgcaatgctccggcttgagcagattcagcttgaagttaggatcggttatcaggttgccaatgccattttcgacttcttcaataatggtattaatgcgtttatcaatatcggcaggaatctctttcccctgcttttcgtattccataccaagtgccatcgattcgtcgtacatgctctgtagttggtgtgacatcatggtcaatagcaggtcggcgaggtctttagcggaatgcgcttgggccacatcgtcaacgcgtttgcgcgcgtcatcaaaaaggcctccgtgcaggtttttcaggatcagtaacagcacttggcgcaagctggcgtttttcggaatacgaacaatttcccactgtgtaagctgacctttcgtctccaggtagcttttgagacggcagtccaaccagcgcaccagatgtgattttcccatccctgagtcgccaatcagtgggatagcacgctcggtagtaagcagttggtcaaaaagatcctcatcttggaggatctcctgattgttattgacgtcgcgacggatgagagccatcttttcatgcacagctagaagcacgtcatcctgcaattcttcagcttctttacggatgcattgctcgatgttctcaagggatggccagtagttcataatgctcattatgcgatctccctgagactaaccttgcttacggggcggatttcactagtgggaagttgcagggataacgattcggcatcatcacttccgaaagtcagttggatctgttggctgatctccagacgacggagcgcaagcgaagtgctggtactgatgtttttgccttccggtgcggaccacccccgttcggccatcatttcctgcactgtcactctaaaatcgccaccatccatcattggcatcgcttctgccatattggccataaaggctttgatgggcagggttttctggtcgccaaaaatttgcggtaaaaagcatttaattgcccgggtaggatcagtgtaatatttttggtctggagctaattccaggaagccaaggtagcgaccatattctataggtaatttttcactattactgttgatcgttcctgctggcaaccatttatgtacatttttagcaacttcagttactgaaagaggttctgcccccatcaatgtatgttgttgcaaacttagcaaacacgacagcactcgccacataggttcgcactcattcccttcggcgatgcctttttctttgcaggcttcgatggtgcattgcagcactcgctgatagagcggacgtgtttcttctggttgcggtagtagcgcttcattttccataggccaaagtcccaaacgacaccagaaggcaaggttctctctaatctttccccaggcattgtcgttcgcggggagattgtttgggcgatagcgagctatgatcgcatcctgagaaagcgaaacacgggcgttttgtacaatgcgatcaaacaaagggagcagcaccaggctgctgccagggttggcattattgatgattgacatattgtgattgcctgataaaagtgtctaggggcagagagttttctgcgctatcccaccattttctgtacggatgcagtggatctgccagatgctgcggggcgataataatacgttcataacgtgaggctggtagtgtcggtagcactgtggcggtatttgccacgatcacaatttctgctccgtttgacgttggtgctgcaagtttttgtacgctccagaaacgagacacagaatctaaagcgcgttccagatgaataaagttaactttatctgctcggatggtttcgtaattgccggaaccgatcagatggcgaagggtaacgcgaagttctgacagcaaagttcgaatatccatttcttcgctgtaatacacttttttttcagctccaacgaagcgtgcttttttctttggtgtcgattgcaagatttttacatcggtgccaacggttggagagaatgaggccttgccctgagcccggcaacctgggcagcctccacaggttagctcaggttcattattttgataaatataaaattttcttaaaacctgacacaaagatggttcgagatccttcagccattctcttaacaacgtaaaagctgcttgcctcttattcaattcttccctacgggctttttccacaaagttattccagtactcttccgaaaggtgtgaatcgttgcagtgacgaatatgtacttggctataataattggcaaaccaaccacggatcgcctgatcgtttttttctccaccttctcgtaagctttccggtagttcaggtgcagcaaacaccagttcaatcagtcctgtacgctgcatcagtaagagggttctgcggttccaggcttggttgcgatctccctgatagtcgatgtaatcgggtttggtatccagagagatacaatagttggcgatatcacttggctgacgttgttcaaacatcgctttccagcgtaagaaacctttttcgacgctgatgagtttttcaactgagagattttccgccgtctccatctgcgctggatgccagaccagatgtgcctgacacgctttgccgtcacgccctgcacgtccgcactcctgatagtagcgatcaatattttccggaacagcggcatgaatgatcgtgcggacgttgcttttattcatcccaacgccaaacgcagaagtggcaatcattatatctagttgatcgttcgcccattgtgaaattagctttctacgcgtcagcgtttccgtatcaccatggaacaggccgacacggtgatattgttgtagttgaagtcgttgataccagctttctgcttcttcttgagtcgtgcaatagagaatgagtggacgtgggagtgacatcaacaactgttcaacacgttgcttatgtgaggtcggattaggctcggtatgcacgaagtattcaggttcgggacgcaggaagttcgccgtgatttcaatgagttcactgtcatctgcacggaattgctccacaatgacgtcacgagtgttctggctccaggtggcggagagcagcagggtgcggaaacggcaatcaggctgggctttcagtgaacggatcaatggcgcaatgagctgaaagtcagggcggaattcggctccccattgatcaattagatgtgcttcgtcgataatgacggcaccaatcagattattttttgccagctcaaatagcaccggaaccagcgatgatttagctgcttccggtgagcaaaacagggctcgctgggtgccgtttttcagccgctctttcagtgtctggcgcgtcgtctgatcctgcccgccaacccacgcgtagcttccgccatgatcctgttcggccttgcgcagcatatcccgcatcaaatcggcttgttcaatcgccagtgctactgtcgggacaatgactaaagttaaggaacaggcaggagcgctgatagcctggatttgagttatcaggcttttgccgcaactggtaggtagatttatcaccaacgtactgttgatgtctgaggtgagcaacgtgcggattgctgcctgctgcccaaagccgcgatagtgcgtatgtggtgtatctaccagcaggtttttaagcgccggatccatctccggttgtagtaaattacgccgggttctgcattggtaagtagcttttgtgctatctaggtgcatatctacagagagtgacaacgtctgccctgcgactgattttaccagaccccaaagaggatggggcatatcctttattgttggtggagaggggagccacggttcttcgatgccattcgcctgtgcggctcgaagggcatcggcgtaaccagcaaaaatatcattctgaccagcggaggaatcggtaataatattcattaaccgtttaagaaagggattttcaatcccttccgtaaaggtcacatcttcattaaaacaggttgtcagcgccaactgtagacgcgaccattgttcaatcattaggcgactccggataaaatattgctgctacagatgatgatcgcttttactgacattaactggatataagcgctgtctccgaccaaaccacgctgtttttgcaaagctttatcataaacctgctcgaccatttctttccaagcatcagcggaaatcagttcttctatttcctgccatcttgaggcgcgcaggttgagatcaacatagcttttcgttgctgaaggatttttgctgtactcgctgtttagtatcttaaggagttgtggactggtcacaagagaactgtcagcagcaacccactcctgcactatgcgtggcggtgcaagctcgtcgcttttacgaaggtaggcgtaagggctgagggggtcgcaaccggtaatgagccaagtcatctcgaagaagtagcgaggggcgttgagttgcgcgttaatcatacgcagcaatgccacagaacttccacgtgcatcttgattcaggagttgccaaattgcatcgacaaagggctgaccatagcgcaaaggatataccgctgtcccgtcaatagccgagatacgctttgcgctcatcagatgtgtggaaggagggtaaccccctctttgtcaaagctgagcatacaggtcgtgaggaatgttttaaagtcgactagcgtacctgaactgcgttcagccagttcgaaacggaaccgtatgccctcttcagtatttcccgatgagcggaagcgtaatccctcggtgatccagagcgtcagggctttgctctgttctacagcggttaggtcgtcattgcttaactgctgcgcgaaaagtgcagcttgcacgacgtcttcatccatcgccagcagtttttcctgcatgttgattttgttagtttctctgaacaacacgccgttttcgcctggcaattctgtcgcaaggttttctagtacttgtggaccttctcggaacaacctgctccaggcatcgccaatatagtcatcaagcacaaattgaaggctggcgatagtgttgttaaatacgccaatgctgttcaccagaagatctgcccacagattacgtaaaccttgggcagcataattctttagcaaaaggctctgaattggtttgatccttatcagattggcactatagcgattgaggcgcccaagtcgctgctcgatacgactgcaggaacgcggcaagccgtagtgaacagccagacggcgccctccatggagattcagcccatcctcgccacttttatcgcacagaagtacccgaatggggctttgcggttgggtaaattgcaaagtttgacccggtagataacgttcaaccggatagtccaacaggatacttagtttgaccgacagatgttgcgccaactcagggcgatcgcagaacacaattgctttaccctccgggaattgcttcagccagtcattgagtgctgcagctaacatattgtcgatggcctgtagttcgtttttggccgttgagactatgtgttccagcaatgcctgttcatcggaaggaagagggtttgaagatgcaagagtcgcttttgcacgctgcatcacgcacaatggactggaaaatagatcgtcaacccagtcgatatagctcgcttcttttagcgaccagttatggttttgcggcagcactgccatggcccgatattcttccagtaactcgtccagcgtcagcccttcggtttgccagtgatactcaatcaccccatccagtccagggaatagcagatttaaattcaggttcttactttcgtcctgactaagggcgacttggcggcggtttctcaacaaacgatgatggattcgataatgttcaccaaggtgcaggcgtatcgctttaatacccgcttcacgctcaggcgttggctgagagaatctgccaattaacggaaacaagtcctggcacagcgttgttaactgatggtcatccggaaattgcgcaagaatttcatcaaggttacggcggagactgatgttagacactgacggtacaagggccgagaaaacgccaccaagactttcacggtttttcaccaattcggtgaacgcctttagatggttctcgtcaatctgataagcctctggattgatacaatgcagcatcgacaggaagttacgctcatgtccatgaagcggtgttcctgtaagtagcaacacataatgtgctctgtggcacgcctgtgaaatcaggccgaaattatggcgttcgtcttcatctattgaccatggccagtttgcaatttggtggatctcatcgacggtaaccagagatggtttgaatcctctgctaagcagaaggctggcttcagtataactgcagataactatcccttgcgcgatcccatcttgccttaatgaagagagtgttgtcgtcacatctacgagcaactgtctcagctgaaaacgttcacccaattcttcccgccactgcttaacgagttggttgggtacggcaatgagcatgctgacatgactggcttcttctagcgcgtgttcacgaatgatcatgcctgcttcaatcgtttttccgagccctacttcatctgccagaatatacttcggcgttttatcttgcagtacgcgccgtacaacagctaattgatgaggttcaagttcaactgcgctgcttgaaagggaagccattccccgacatgacgctcgctgctggatatacgtattgataaaggattgacggcgagggaagaaaaacggagcatcattcgtctgagaggcaaggaaatgggccggattaatcgggatatcagaggctttattgagaacgtagactttatcgatcgggagagtcgcagattcgtcttctcgaaagattaccagaaaatcgccattgggacgggatccgccaaaacgcgcgcgtacccatcgctggctttctggttcgatacaatatatcactgcctcatcgtgaggaattgtcggaatcaacttatccagacgagtatcagtgtgccgggcgaaaggttgcaagggggactcaaaaaatgcaactgttgcgcggttggcatcaatatcaacattagtaactttgccaatgccgtcaaaactatccgaaataaccaacgacccaattggtaatacactcatccacacaatccttgaaaatgctttctcagacacatttgattgaaaaatgtacagtcatgggatgcgattagagattttccacgtctgagtgacaatgtaagggaaagcaaaatttacgtacatgaggatagaatactgtgataaaccctatattcaagtagaaaatgtaaaaaatctctttggtttcacagaacgtaaatcaatgtggttaaacacaataagatatgtgaatcgccacggataatctagacacttctgagccgttgataatataggttttcatattcagccggtggcatctgctcgctcgaaccatgccgacgcttactgttataaaacatttcgatataatcaaaaatatcgcttctggcttcgtctctcgttccgtagatacttttcttaatccgttcgcgtttcagtagtttgaaaaagctttccgcaaccgcgttgtcatgacagttaccgcgacgactcatgctgccttccagagcgtgcgatttcaggaacgactgccactcatagctcgtatactgactgccctgaacagagtgaaccagtaccggctttgagggttacgcctccacaccgccataagtaatgcgttcaggataatctcttttatcatgcggggttacattgaccagtcgataacttttcgggagaacaggtcaaccaccacggccagatacagccagccttcgtgggttcggatgtcggttatgtccgtcacccaacgctcatccggtgagtccggattgtactgccgctggagcctgttggatgtcacgatgctggcttcacctttacgtgcacgtgggctacggtacccaacctgagcttttattccggcacgcttcatcagccgccaaacccggttcactacgcactgctgtccggtatcacgcaaatcgagatgtgtcttgcgataaccatagatgcagccagacttaagccagaactgtttgatctgcccggtcagcatctggtctgtctggtgacactgtgaatgtggctgcttaagccagaaataaaatccactcggatggacatccagaaccctacagagcaaacgaacaggccagcaacggctgttgtcgcggataaaggtgtacctcagtcgtacagctttgcgaagtacgccgcggctttttttaatatgtcccgttcgtccgtaatccgcttcaactctttctgaagacggcggatctcggcctgagcatctgactgttcattatgagtggaagaaaccggaccgtacttctttatcttggcgtaaaggctgtgagtggtgatatcgagacatgttgcaacactggaaacagaatgaccacgatcaacaacctgtttgactgcttcaattttaaactcttcaggataacgcttaccgctcatgggcacctctctttaagtcatcttaaatgactctgagatgtctgttaaatccgtggcgattcaatgaaatttaatttcaactactatttatggtattaaattatttcgattgatgttttgtattgagattttttattattttatgacactatttgatatatgctaaatttttatgatggcggttattgaaggtgattttttattttaattttatgtttaagcatttagatagccacaatttagttcttggctatctaaatgagtcactacacaccgcgataaatacatcccgcagtgcatgtttctttcacgactacagcacttagtattggtaacagaggcttaacctgattccatacccattcagctaagacttcactagttggattttccagacctggtatatcgttgagataatagtgatccaaacgatctaatgttggtttaaaaatcgctttaagttccgcaaaatcgataatccaaccggtatttttattcacctctccagtaatctcaaggcgaaccacaaaagaatgcccatgtaggcgcccgcatttatgtccgtcgggtacattaggtagtcggtgtgcagcttcgaatgtgaaatctttatacagggtcgttttcatagttacctcgtcttttgttataatataacaaagtaagttagggataggaagtgctacgatcttagtgacgtggcgctagtgttcattaagtagttcatcttttgacgacattactgctgattagcaactctgcataaatagttaggctcctaaagatctaggttagagctagcaaactagcgtttatgaagatggataagtttgtaagttgatatgggttgcaatatttagtctttgcacttctctccgagagatataactttgtctagtaacgccactttttggcgctattgacgttcgctcgattaacgaataaccatcacggatgttcctattcttcaatctctgaatcacttaatgcttgccgtcagtaatttgcaaagtagcctgactttctgacgcgatttgctggggttgcagcttcatgctgagtgggataccggtgcttaccttacctgtggggacctttggatctgtctttcttatgacgtatcacgcaactacgtagccacgcaggaaggcgactacacccactatgcattcagcatcgcgccagaggattttgagtcgttctcgtataagctgaaacaggcgggagtgacggtctggaaagacaataaaagcgaagggcaatctttctattttcttgacccggatggtcacaagtcggagttgcatgtgggagatttagcatctcgactggtgcaatgccgtgagaggctttactctggaatgcgtttcggatctggaaagtaagcacgcaactttgtgatcttccacccagtattcaattttatgtcccattctgggggcaaacccccaaactaaaatctcataaccaatttattttcaacaaattaaacgaaaaggcgagtccagccttcgcccccactctcaagcatcaatatcaaaacaaccaataaataatccctttaatctaacaacgacgaatcattgatcaaccacgaaatcctctccgaaacacagtcacaatccctaaaccctacgctccacattaaaccccacacaccatcccccctcatcccctgaacacctcccgccggtgccatgccacaaacccttcctgcggatagcattctttcccctgcggcaaggtaatcggcttaccatcaaaatcccagaacagcctgccaacgatgccccgccgttcaccgccggcgaaacctggatgcgcatatcctcatccagaccaatggatcctttatcaaaagccttatggtgaatcgcgcagagcgccaggccgttagggatttcacatgggccgccgtgctgcttccatttgatatgggccgcttccagggcgacggaggtattatcatggcgcatattgaagccgcagatcgcgcactcatagttataggcgcgcagcacctgctggcgaaaatgcgggtcgcgctctttacggatctgctgcagatcaaatcccatctcttcagccagttcttcctgaatactctccgggaaatgcgcctcgaggatcagatgggcgagggtattgatcagcctcttatttttgttgagtaacgcaaaatgcggctcatcgaagccgccggcgacgttacagagctccagctctttgccgggcggctgtcggctgccctgggttgaacactggtcgctgttgtgcagctcccagaagccgtcgcctttcaggcgccagaagggcatatccggccggtactggcggcgctgcgggccaaagcgttccagcaggctatgcagctcatcgcgtatctccgaggcgtagtcgaacatccgcgcatggccgcgccggtactgtgagaggacgtacagcagcaacagtggcttatgcggcgcacgctgttcgcctttgcgccagatggtgatgttttcgatcgcgtgttgcagggtcgtgctggagggcatagcgttacagtggcagctaaataaatgcgatgatgctcgcaaaatccttgccgatcaacccaccagatgcggcgattccaggtggatcactttttaagtattacgacggatcttgctgtgggagtggagaccgcgttcgccgcctgcgacgcaagcctgaaaaaatcggaagcgcataaccgttgcgttcccacagttcacaaaccccacgctacctcaccggtagcgtgggccagctttctcttacttatcccgcgtctcgccagcctcccagctgtagctgccatcggccgctaacctatcgcccagctcctgatactcgaactgataaaactcagcctgggtgccgtacccggcgtagtctaccgccgccaggccgacgaacgccccggtaaagaacccgccgtagctctgcaatacatagtcatcggacagtaccgcggcatccagctgaaccgggatctcggtgaaggtcacgccatcgaagctatattcatagctgtaggtctgcttgcggaccttggtccggaaccagacgtattccacgccgtccggcaccatgatggcgttatctttcaggtacgacgtgtattttccgcggttattttcgccgacttcgatgaccttgccgttaatttcattccaggtcaggaagacgaagctccagtggcggtcgttatagtagtttgttaatccggccatctgctggtagctgaagggttcgaatttcaccttcaccgcggcgtcaaaatagaaggcctgccagcggcgggcaatcagcgacaggtcatgcgtattggctaacgaaccctggccgattaaggttaatttgccgtcgccggtggtgcccattttggccgtaaacggcactcgcagggtattccagttcgggtcgagcgctggcgaggtaaagtcatcctgctggctattatcgctggcgctttcggtgaagatggcgtctttcggcccgtcgacgaaggttttcccgccgtgaccgccttcaatacgcggccagccttcgtcgtcccagtatactttctggatcgcggtttcccggccgagggttgaccagccgcgcgggtcgtagatagattccccgggcgattccacggccgggcgcagagcgaggcgtaataccattcgccttccggggtggagaccagcgcgccatggccctgtttctggatgtagctgtccggggtatcgacgttggttaagaacacgtcgcccggctcggtttcgaagctgtcggcctcgagggttttcgaccgcgccaccacctcctggtgggtaaacacggtgccgccctgggcggcaaacagatagtagtagccgttcagtttatagaggtgcggcccctcgaccagcgccacggcggtgccgcggtagatggtgcgcgcggtttccggcattaacttcagcgtcttggtatccagctccgttaaggtaatgccatcgaaggggtgatggtactcccggtgatcccaggtttgctggacgatatatttccggccatcgtcgtcatggaacagcgaggcgtcaaacccgacgccgttcagcttgatcgggtcgctccacgggccccgaatatccttcgccgtggtcaggtagttggtcatgtctttaaaggcgccttcggtgaccttcacatcggtatacaccaaccagaattgcccgtcggcccaggagagcgccggggcccaaatgccgccggaggaggggttgcccttcatatccagcagggtggtggtggagagcggcgaaggcagcaggttccagtttttcaggtctttggactcatgtaaacgcacgcccgggaaccactcaaacgtcgagttggcaatatagtacgtatcctcgacgcgaataatactggggtcggcattaaagccgcgtaatatcgggttttgaataagtgacatttcattacaccttttaaaatggaaagttaaggatcggtctgatttataatttttttaactacacgcggatctcatccagctgacggttgatgtcggtcacatgtttatcggagatcggataaacctgcatgatcaccatcgaaatagcggccagcgcaattgggatccacaccgcggtcataatgatcccgtcgatggcgctggcgctctgcacggcgccgctttcattaaatccatacaccgccagcagccacagcgggatagcgccgccgatggtgaagccgatcttgaagaagagtcccataatggcattgataatggcggcattgcgtttgcccgattttaattcgccgtacgcgataacttccggtaccagcgcccacataaagccggtggcggaggttaagccccactgtttaataaaggtggcgatgtaggccagccacagggcgtcgtgcatcccttcgcgggaccaggcgtaggtcagcagttcgccgacgatgaacatggcgaggaacagatggaagaagccttttttaccaaagatttttttcagtttcggccagaacaccgggaaggcgatgccgggaatagacgcgacgaggcccacggcgcccatccattcggagtggccgacgacgaactggttgaagaagccgttaacggtgttcatgaagaacatgaaggtaaaggccagcataaagaacatgccgagaataaccagcggacggttatgtctgagctcgtggaaaaggtcggtagttttgacgttggcggtctgctcggcggtcgcgaccacgcgttctttggtgcatttgtagcagataaacagggccaccgcgccgatgatcatatagatggcgtacacgccgaaccaggcgtagttcgctgacggatcggtatagttccccagattcagctcaaggccgaaaaagccggtatctttcaggctgcgatctttcggcgccgccatctgcacaaacatcgggaacagggtatagaccagcaggttggcgctgttggccagcatcatgcgggtactggtcagcttatcgatcgattccgggtcgcgggtcagcgacgcattcagcgagccatagggaatattgactaaggaataaaccaggtccagcgccagataaataataaaggcgaaagccaccgaacctttcaccccagggattggcgcgaacagtaatgccgacaggatcaccagcggcacgccggctcgtaacagccagggtcgatatttccctgcttttgaggttcgtttatccacgtaggttccgaccatcggatcccaaaacacattaatgatacggacaaaaagaaaaataaagcctgccgttgccgtgctgatggtatttaccgtcagcatatgcaaagccagaaaacccccaattgtgccgaaaaccaggttttgcgcaaagtcgcccatgccataaccaattcgttctccacgggttaatttatgatattcatcatgccgactgtgcattatgtttttactcattctaagcagactccggtttgttttgtgtaggtgaaacactttctgacacagttgacctggaagaatctattacgtttttaaattacgtaattatgtttttttacttctgtgatcctcgaagcaaaggcctgtatcgcctgcgttgaaccgttatccgccgctaattttttggcaggcgggcattgtgacaaaaccggcattttaatttggtatggatacctgaattccccaggaagtgtacgctatacgcgcgcgaagcgagatatttaaaatagttttatttgcgagatggctcacatttgagcattttctcaatcgccgagtgaaataacgtaattgagcaaccgacgatgagaatacacgatgtgtcacagttgttaattttcctgtttctcaatttcggagttcatcatgcaaacctatttcgaccaggtagatcgcgttcgctttgccggacccaaaaccgataatccgctggcgtttcgccactataatccggatgaaatcgtgctgggaaaacgcatggcagatcatctgcgttttgccgcctgttactggcataatttctgctggaatggcgcggatatgtttggcgccggctcgtttgagcgtccctggcaggccgcgggcgatgcgctggaaatggccaaacgcaaagcggacgtggcgtttgaatttttctacaagctcaacgtgccgtattactgcttccacgatgtcgacgtctcgccagaaggcgcgtcgctgaaagaatatctgcacaatttcgccatcatgaccgaggtgctggcggaaaaacagcagcaaaccggcgtgaaactgctgtggggcaccgccaactgctttacccacccgcgctacggcgccggggcggcgaccaaccccgatccggaggtatttgcctgggcggccacgcaggtagtgaccgccatgaatgccacccaccggctcggcggcgaaaactatgtgctgtggggcggccgcgaaggttacgagtccctgctgaataccgatctgcgccaggagcgcgagcagattggccgcttcctgcagatggtggtggagcacaagcataagattggctttggcggcacgctgcttatcgagccgaaaccgcaggagcccactaagcatcagtacgattacgatgtcgcgacggtgtatggtttcctgaagcagtttggtctggaaaatgagatcaaggtgaacattgaagccaaccacgccaccctggcggggcactctttccaccatgaaatcgccagtgccatcgcgctgggcattttcggctccgttgatgccaaccgcggcgatgcgcagctcggctgggataccgatcagttcccgaacagcgtggaagaaaataccctggtgatgtatgagatcctcaaagccgggggattcactaccggcggcctgaactttgacgccaaagttcgccggcagagcaccgacaaatacgacatgttctatggccatattggcgccatggacgtgatggcgctgtcccttaagctggccgcgcgcatgattgaggatggcaagctcgatcagggtctggcaaaacgctatgccggctggcagggcgagctggggcagaaaattatgagcgggcagatgtcgctggataatattgcccgatacgctgagcagcataatctgaatccgcagcctcagagcgggcgtcaggaattactcgaaaatctcgtcaatacctatatctttggttaatttttgctgacatgcccccgcgggggcatgtattccgccgtctatccgctgccgggaaatagcgtttattggttcgtgctgtgttttttttgtcagtggcgaaagaccacctgtttaatatcagcgaaggaggaagggtaacgataattgtgtaacgcctctgtgaccgtacaaaataaaaaataacttgttctgatgatagcgacatattctgtcagctcagaataggctggttattgtctgaataaaattaacctatattgagaaactcatgacaatgataaaaaagcttccattaaccatggcggttatcgccgcgttttttccgcttacctctgtaatggcgcaagaatttactcaggaacagatcgacgccatcgtcgccaaagccgttgataaagcgctggccgaccgccaggcgaaaatcgacgccgcggccgacaaaaaggtcgacgtgatcaccaacccgcagaccaccgccgcctcgccggatatggccattccgtttggcctcaagttcagcggctacgcccgctatggcgcccacttccagaccggcgaccagaaatatgtcggcgtcgacggctcctataacggcgcctcggcgatcggccgtctgggcaacgaaagcaacggcggcgaattccagatcagcaaggccttcaaaagcgcgcagggggctatctgggatcttaacgtgatgttcgaccactggagcgacgaagttaacctgaagaaggcctacgtcggggtcaccaacgtgctggaatccaaccccaacgcctatatctgggccggccgcgacttccaccagcgtccgcaacaggggatcaacgactacttctggatgaaccacgacggccagggcgccggggtgaagaactttgatatcggcggcgtgcagttcgacgtggcggcggtgtcgcaggtgaaatcctgtagtccggaagtgatggccgacgagaccaacccgtcgcgcatcacctgtaccggcagctccgacaccggcgacaacggccactacgcgctgaccaccaaaacccacaacatcaaggccgggccgatcgacgtcgaggtgtacgccaactacggctttgactcaaaggcggtggacagcgacgcgcgtctcgaagcctggcagggcgggctggtgctgagccacaccaacgacagcggggtaaacaaggtgatcctgcgctactccgacaactcggataacagcgtctacaacaaaaccgacgccctgaccacggtctacgccagcttcgagggcagccataagttcacccagcaggcgcagatcgagtatctgctggccttccatgactacgacaacggcaaggacaacaccgacaaccgtaaaaactacggtgccatcgtgcggccgatgtatttctggaacgacgtgcactccacctggctggaagcgggctaccagcgcgtggactacgaccagggcggggataaccacggctggaagctgacgctgtcgcagaacatcgccatcggcatggggccggagttccgtccgatgctgcgcttctacgtgaccggcggccaggtggataacgagcacaccgcgaaggtaaacggcacccaggaccagcagctggattcgctgaacgtcggcgggatgtttgaggcgtggttctgatgcgatagcgttgtcgaaggagcgttcccggctggcgctacgcttagccgggctacgactggcgcgctccatttatgccggatggcggcatacatgccttatccggcctacagaaaacctccccccccaggaccggcaagcgcagcgccgccgggcagctggttcaggccaactccctcagttcaccgtcaggcgcagggccagatcctgcgggtaggggtcaaaatagttctgcgcctgcaggtagcgatccggatactcggccagatagtgcttaagcagcgtcagcggggcgaggatcggcagcagcccggcgcgatagttgaggatcacctcccgcagctcgccgcgctggcggctgttcagctggtcgcggaaataaccctgaatatgcatcagcacgttggtgtggtttttccgcgaggcgggctgcttgaggatcgccatcagcttctcgcggtaaacctcgaagaacgcctccagatcctcccattcatgcagcgaggcgacgaacgggccgatctcccggtagcccgcctggtgatgagccagcagctgcagcttgtagcggctgtgaaaggccagcaggctgtggcgggtcaggccgcgggcgcgcagggcgttgagttcatgcagggcgaaaacgcgctcgacaaaattctcccgcagcagcggatcgtgcagccggccatcctcttccaccggcagccacgggtagcgcgccatcagggcgccggtaaacagccccacgccttccttacgcccgcgattgcctttttcgtcatacagccgcacgcgctccatcccgcagctcggcgatttggcgcagacgataaagcccgacagctcacccagggttgcgaggtgggcgctggcgaaatcagccatcttctccgtcacatcctcgtgcggggcgtggctgaagcgcatgcggatctccccgaccggggtctgcaccaggcggagcgccgggcggggaacgggcaggccgatcgccatctccgggcagacgggtttaaacgccacccactgcgcgagctcatccatcacaaagcccatacgcttatgcccgccgtcgaatcgcacggctgagccggttaaacatccgctgatcccaatgacaggttgcgtgttcatggcgctgtcctctcttctgctgtggttcgggtaaagaaaagggtcacggtggcgaccgtaatgccgaatttcttcatctcggttttgttaaataaatggctgccgtcctgcaggaacatccagtcgtcaaagtgcagcagccaccggctgccgctggcctcgacgctcatgctgtagcgccagtgaaaggcattgcctgccgcctggccgctggccacgccttcgatatccccggcggtgccctgataacggttatcgccggtgcggcgaatgcgccatatccgctgctgcttctcgccgtcgtcatagacaaagcgctcatggagggtcagggtgtcgccgacgacgtcgccatcgatctcaacatggaagcggcgcagctgcttgccgctacgatcctgcaccatcccccacgcctcggttcggccctgaaaatagtgaaagatgtcgagggcgggctgctgctgccggtattcggtgacctcggtgctgcagccggcgaggatctgcatcagcagcgccaggccaagggtcagaatgcgtttcatggtgtacctccgatcaactgctgacgcagttcgggataagtggtgcgcggatcgagccagatggcgagaaagcgggtgctgaacgccgccgactggcgcgggccgagcggggtaaaggcggtctgcgcggcgctggcgcggtaccagaactgcccctcgccgccgctgaccacgaacgccagctggctgcccggcgcgacgtccggccagatcccctgcagcatgcgtagccaggcttcgctgcgcggttcctgctgcagaatgccctgcgcctgccactggtcgcgggtggcctccaccagcgcctcgcgatcgatgtcgcgccggtaggtgatgatcagcgcccgatcctgctgcgggccgtcataccggccattgggcgtgcgcagctgcgagtgatagatggtgaacggcccccaggtgagggtcgcctcgccgacgcggcgccacgtcagccagtcggcggcgtgggccgccggggcgaggatggtcagccacagcagtaacagggcgaatctcatttttgcctccccatccccagatggaataacagcatgagcaccagccagccgcaggccatggcggccacgccaagcgccatcggcaccagcagggtcatggctccgaggcgagcgccgatcaggtaggccaccgggccgccgacggtggcggccgtggccagcacccagccgggaagcgtcgcggtgcgggtcagtcgggtccagacgacggcgaacatcagccacagggccaccatccacaggggcagcaggctgtcgccgcgaaaatcgatcagtcccgccagcgcccagcaggcgtccagaccgcagcccgccgcggccaacagcagggcgggcggacgactggccgccggcaaccgcagccaggcgaaaatggccagcgtcagccagatcagcagaccgcgctcgcgcaacatcaccaccagcgtccagtaaacatcgaacgcgagggccatcagcagatgctgcgccgggcgtgtcatacccgctccgcggtgagctgcaccacgctgatggtgcgggcgttaaatccggcttcacagtagccgaagtagtagagccacatccggcggaagcgctcatcaaagccgagcttttcaatatcctgccaggcgtgggtaaagcgctgtcgccagtgcgccagggtgcgggcatagtccgggcccatgtcgaacaggttgcgtatcacaaaatcggtatggcgggtcatcagctcgctcattgccgtgatgctgggcaaaaagccgccggggaagatgtagcgctggataaaatcgacgcttttgctgtagtcgcgatagcgctgatcctggatggtgatcgcctgcagggccattctgccgcccgggcgcaggcgcgcctggcaggtgcggaagaaggccggcaggtagcgctggcccaccgcctcaatcatctccaccgacaccagtttgtcgtactcgccgcgcagatcgcggtagtcgcagagcagcacctcgacgcgatcctgcagcccggcgcgggccatgcgctcggtagcccagcggtgctgctcccgggaaagggtggtggtggtgacccggcagccgtaatggcgggcggcgtactcggccagcgccccccagccggtgccaatctccagcagatgatcgccgggagtgagcgccagctggtcgcacaggcgcgccatcttggcccgctgggcctgggtcagatcctgctggtcgtcggtaaacagcgcgctggagtagagcaggtcgtcatccagaaaatgggcataaaattcgttgccgaggtcgtaatgggcggcgatgttctcccgcgcctgggcgcgggtgttgcggcgggtccagtggcgcaggcgggcgacgggcttgcccagcagacggaagccgcgctccagacgccccagcacctcgccgttgcgcgcaaggatctgcagcagcgccgtcagctggtggctctcccagtcgccgtccatccaggcctcggccgccgccaggctgccgccggtcagcagacgccagtacacctccggcgtgcagacccgcacctcggcgcgcagcgcggcggcggggtcgccaaaatgaaaagtctgcgccccttcgcgcatggtgagcgagccttcgcggaggccgctcaacagacgaaaaagcagccagcgcgcgagccgcacgttgcgcggcacatcgggttcaagcgcaaagacgggatcggtcatgagcgttcactcctgctgacaggatggttgtacagcggcacgcgcttcagccacagccgcagcgcctgccagtagatggcgaggacggttttcagggtcatcagcggcagacgcagcagcagcccgcgcaggttggcgcgggtcaacggcacgcggctcagggccagggtggcgtcgaacaccttgctggcctgatggttttcaatatgcatgtgcagcgttttgccgggcgcgttgaagcgccagtgatagaccatgtccatcgggttaaagggcgaaacgtgaaaggctttctccagcgggcgcgcctgctggccgtccaccgcgtagtaatgacgctcattccacggcgtgttgcgcacttcggccagcacccagcgcagggtgtcggcttcgtcatagcagtagtaaaagttgaccggattaaaatggaagccgaagtagcgcagctgggtcaggagcatcacgcggcccgccgggcggcagccggtcaggctctccagccggttcagcgcctgggccttcagcggcgcgcccagcggataatcggcatcgtaccaggcggcggcggccaggcggttgcggcggatgcccgcctcaggcagcctgtccagttcgtcgaggtcgagccaggccataaacaggcggtagacgaagtggtgcgccttcggctgcaggcgacggtggcgcaggacgccctgatagaggcagctgttcatttcagttgccctccgccgcggcgatgccctgcaccacgtcgagcgcgctgcgcaccccatcctcatgaaagccgttgtaccagtaggcgccgcagtaccagctccgctgctggccgttaatctcttcgcgccgcaactgggccgaccagctttgcgggttaaacagcggatgctcatagacgaagcgctgccagacgtagcgatcgtccaccggcgcgtccgggttcagggtaacgcagaacaggggggcgcccgcgggcagcccctggagaatattcatgttgtaggtgacgcaggcccgggcccgatccccgtcgctcaggcgatagttccagctggcccaggcgcgctggcgctccggcagccagcgcggatcgctgtgcagcaccacctcgttacgctgccagccgatgtccccaaggacttctcgttctgaatcggtgggcgccgccagcatcgccagggcctgcgcggagtggcaggcgaagatcacctggtcaaaatgcgcctccccggacgccagccgcagggtgacccccgccgggtggcggtccacctgctgcaccggcgcgttgagccgcaggtccagacgatcgccgagcctggcgagcagggcgcgaacgtattcccgggaaccgccgggcaccacgtaccattgcgggcgatcgcgaatatccagcagaccgtggttttcaaagaagcgcaaaaacagcggcagcgggaagcggcgcatctcctgcagcgacgacgaccagatggccgcccccatcggcagaatatagtggcgggcgaagaaggggctgaagcggtggcgggcgaggaagctctccagcgtcgcgcctggatccagcgcctcggtcagcgccagtttcgccagccggttgaagcggacgatctcgctcagcagtccccagaaggccggcttcagcagattgcgccgctgggcgaagagcgaggtcaggctgtggccgttgtactccaggccgctggccgggttgtggaccgagaagctcatctgcgttttttgcccgccgatccccagctcgctgagcaggcccataaagcgcggataggtgcgatcgttgtagacgataaatccggtatcgatggcccaggtgccctgcggcgtggcgacatccacggtggcggtgtggccgcccggcgtggcgcccgcttcgaacagcgttacctgatggtgtccggccagtcgccaggcgcaggtcagcccggcgatgccgctgccgatgatggctatgttcatgagcgcaccatcctgcgcaacagcaggcgctggatacccgatggcaggctggccagcagccgcagggccaggctgaagccggtggggaaggcgatgtggtttttgcccttcgccagaccgtggcggatcgccgccaccgcccgatctacgctcacccgaccgggcatggcgaagtcgtttttgcgcgtcagcggggtgtcgacgaagcccggaaagaccaccgtgacggcgacccctttcgactcccagtccagacgcaggctgttagcaaaccagctcagcgccgccttggaggcgccataggcttccgcgcgcgggaagggcagccagtgcgccatggagctgaccagcaccacccgatcgcctgcctccagctgcgtctgcagcgccgccaggcagttcaccggcccgaggaagttggtggccatcacccgctccacgagggcggcatccacctgtccgtggtcgaggtattcgcaggtcccggcgcagagaatgatcaggtcggcaaaacagcctgtcagcgcctggcgacaggcgtccctgtctgtcatatcgaacaggcgtacgctgatgttggggctgaactgctggagcgctgccaggcgcgacgcatcgcgcccgcaggcgatgaccagatggccatccgccgcgaaggatttcgccaggccggcgccgatcccggagctggcgccggtgatgagcaccgtcatcatgagcgcaccctccgcttcacgccgcgtaccgcccagcccagcaggggaagatgctcgtagatcatctccccggcgtcgtagtagtcgcgctgatggagaacctgctccccggcgatgtccaccaccgagcagcccggcagggccagggtttctccaccggcaatgcgcggatgcgaccagtgcatggtccaggtcacggcgaaccgctggccgtcgcaaagcggcgtgtcgatggtgaaccggcactgctccacgttggccagcagatgggtaaagtagcgctgaatggcgaacagcccctgatgctgaccaaaaggatcgctcagcgtcgcgtccggatggtacagcgcggccagcgccgcgggcggctgtgcatccagcccggcgtagtactcaacgaaacgacgaatcacggacggcgaggtgctcatggatcacatcctggctagatacggtagcgtaatggcatacttaaaacnnnnnnnnnnnnnnnnnnnnnnnnnnnnnnnnnnnnnnnnntattttatttgtgttaaaaatcatgttgttatgattggtgttttaaggagtgaaaatcacgggtggtgcaaagggcaagcgtgagcccgccgcgccaccgggcgctggcggaacagagcgtggaggtaagtgaaaacagggggttagagcgggatcacctcgagggagacgacctgctgctgccagagttcgacctgcctctggcgggcggcggaaagtttgccgctggtgaccagcagccagttgcgctgggggaaaatctccggcgccagggcggcgggtggcaccggcaggacgtcgatgcgatggccctggccggtacgtttgagcgcctcaagccagatttcgcaggcgtcggtcaggtgccagccggtgatcagaaagttgtccccgggcgccttcttgtcgccttcgaggcaaaacgaggtataggcgatgatgatgccgtcgagaatttcgcgcagcgtcatgatggccggcacgttggcggagacctggctgcgcagcggacgcagcacctcggttaccagctcctggcgcggatattcgcgcccggcgtcgtagatcagctggcgcagagactcgatttttccctctttcagtcgctgcagcatggtctcctgcagcgtcagccagttattggtgcgccgcgcgccggggcgcgacagcaggggtttcacctggctgaccggcaccccttttttcacccagtcgaggatcttcagcgcctgctggacgtcgtcatcgctgtacagacggtgtccaccatcggtgcgcagcggcttaagcaggccgtagcggcgctgccaggcgcgaagcgtggtcgcatttatcccgcatagtcgggcaaattcgccgatggagtaaggcatggggaccacctgttaacaaagaatattctcaatatactacgaatcacgacggctggcgtgaagtgtagtggctttgcactacactttccccaaccgcgtaaatgaaaggagttctcatgaagctatggcctgttgtcaccggcgtcgctatcgcgttaaccctggtggcctgcaaatcgcccacgccgccgaagggcgttcagccgattagcgggtttgacgccagccggtaccttggaaaatggtatgaggtcgcccgcctggagaatcgcttcgagcgaggcctggagcaggtgaccgccacctacggcgcccgcagcgacggagggatcagcgtcgtcaaccgcggttatgacccggtcaaaaaacgctggaatgagagcgacggaaaagcctacttcaccggcgcccccaccaccgcggcgctgaaggtgtcgttcttcgggccattctacggcggctataacgtgatccgcctggacgacgactaccagtacgcgctggtcagcggccccaaccgtgactatctgtggatcctgtcgcgcacccccaccattccggcggcggtgaagcaggattacctgaataccgcgcgcgagctgggctttgacgtcgatcgcctggtgtggatccgccagacgccgcgctagcctcgccgcttagcggctgagcagatgggtataaaccacgtacagcccggccagcgccgccacgttgagcgctacgctgatgaaaaaccgcgtccggaagggctgcttttgcgttttatggcgaaagcactgctggccgaggatggcccccggccagcctcccgccaggcccagcaccagcagcgtggtttccggcacccggcgccaggctttgcgcgccgccagcttgtcggcgccatagataagccatgtcagaaggctgctcagtaaaaaccacatcgccagcgggtagggcagcagggcgctgcccacggcggtgagcagcagcagggaataacataccaggttcagattcatagggacgttcacgccggccagaagaatggcgccactatagccaatttcccggaccggcgtaaacgcggcgggctattggctacgcttgccccgatgccgggacagccacatcagcttatacgccgccggaatgataaacagcgacagcagcggggcggtgatcatcccgccaatcatcggcgcggcgatacggctcatgacttccgaaccggcgccggtgccccataaaatcggcagcaggccggcgataatcaccgccacggtcatcgccttcggccgcacgcgcagcaccgccccctggtacagcgcctcgtcgagcttatcgacgctgagagtctgcggattctccagcgatggctccgcctcgatggcgtggcgcaggtacatcagcatcaccacgccaaattctgccgccaccccggcgagggcgataaagccggtcccggtggccaccgacagatggaaccccatccagtagaggaaccagatcccgcccacaagggcgaacggcacgctggtgataatcagcagtgcttcgccgacgcggcggaacgccagatacagcagcacgaagataatcattagcgtcatcggcaccatcagcttcagcttctgattggcgcgctccagcagctcaaactgcccggagtaggacacactgatgcccggcttcagcttcacctccttgccgatggcctgctgcagatcgtgcactaccgacaccatgtcgcggtcgcgggcgtcgatgtagatccaactggtcgggcgggcgttctcggtcttcagcatggatggtccagtgaccactttcacctcagccacgtcgccgaggacgatctgttgcttcagcggcgtgaggatcggcagctggcgcagggtctccgggctgtcgcgatagctctgcgggtagcggatgttgatcggatagcgctcgacgccctctaccgtttcgccaaccatcgccccgccgatggcggacgatacaaacagctgcacatcgccgacggtcatcccgtagcgggccgccttctcacgatgaatatcaatgttgaggtagcgcccgccgcccaaccgctcggctaatgccgacgtgactcccggcacgctgcgcgccaccccttcaatttgcccggcgatggcgtcgatatcggccaggttggtgccggaaaccttaatgccgatcgggctcttgatgccggtggagagcatgtcgatgcggttgcggatcggcggcacccacaggttcgccagccctggcagacgcacggttttatccagctcgtcgacgatcttctccatggtcatccccggccgccactgatcctgcggcttgagctgaatggtggtctctaccatctccagcggcgccgagtcggtggcggtctcggccttgccggttttgccgaacacccgcgccacttccggcaccgccatgatcagcttatcggttttctgcagcatatccgccgcctgcgcagcggagatccccggcagcgtggacggcatatacagcagatcgccctcgttgatctgcggcagaaactcgccgccgacccggttaagcggccagacaaccgtcaggatcgacaggagcgcaatcagcagggtagtcttcggccagtgcagcaccttcagcagcagcgggtgataaatgcggatcaaaaagcgattcagcggattgctgttctccgctgggatcctgccgcggatccagaagcccatcaggatcgggatcaccacgatcgccagcagcgccgccccggccatcgaccaggttttggtgaaggccagcgggccgaacagtttgccctcctggccttcgagggtgaaaatcgggataaacgacagagtaatgatcagcaggctgataaacagcgccgggccgacctccaccgaggcctcggtaatgattttccagcgtgtgtcgttgctgagcttctctcccgggtgctgatgctcccactcctccagccgcttatgggcgttctcaatcatcacgatggcggcatcgaccatcgcccccaccgcaatggcgatcccacccagcgacatgatgttggcgttgagcccctggaaatgcatcatgataaaggcgaagcacaggccgagcggcagcgagataattgccaccagcgccgagcgcacgtgccacaggaacagggcgcagaccagcgccacgacgataaactcttccagcagcttgtagctgaggttgtcgatggcgcggtcgataagctggctgcggtcgtaggtggtgaccacttccaccccttccggcaggctgctttgcagcgacgccagcttctctttgaccgccgagatcacctcgcgggcgttcttgccggagcgcaggatcaccacgccgccggccacttcgccctcgccgttaagctcggcgataccgcggcgcatctccgggccgatctgtacccgcgcgacgtcgccgagataaaccggcacgccgttatccccggttttcagcacgatatttttgaagtcgtcgagcgtctgcaggtagccgctggcgcgcaccatatattcggcttccgccagttcgacggaagagccgcccgcctcctggttagagccgcccgcctcctggttagaggcgtccagcgccgatttcacctcgccgaggctgatgccgtactgggtcagcttcatcgggtcgacgacaatctggtactccttgaccacgccgcccaccgacgccacttccgagacgttaggaatggttttcagctcatattttaagaaccagtcctgcagggagcgcagttcggcgagatcgtgcttgccgctgcggtcgaccagcgcgtactcgaagacccagccgacgccggtggcatccgggcccatttcggcgctgaccccggcgggaagtttgccctgcacctggttgagatactccagcacccgcgagcgcgcccagtaaggatcggtgccgtcttcaaaaatcacgtatacgtaggagtcgccaaactgcgagaagccgcgaaccgttttggcgccggggactgacagcatggtggtggtcagcggccaggtgacctggttttcgacgatctgcggcgcctgccccggatagcgggttttgacgatcacctgcacgtcagagagatccggcagggcgtctaccggggtgtggatgatggtccaggttccccagatgctgagaaacagcgccgccatcatcaccaggaagcggttggccaccgagcggcggataatccattcaatcatggttccgttccttagtgcgcgtgggcggcagaggccgcggcatcaggggcctgcgcgcgcatgcgctccagcgcgccggcgatattggcctccgagtcgatcaggaacaggccgctggcgacgactttctcaccctcctgcagcccgctgcgaatggccgtgacgccggcggattcatggaatacctgcacgattttcggcacgaagcggccctcgttatcgacggtgatcactcgctgctcgctgccgctgtcgatcagcgctttggaggggatcagcagcatcggggcgctttcgctggtcagctgcagataggcgttcatccccggcttcagcgcttcatccgggttgttgacctgcaggcgcagctgcagggtgcgggtggcgctatcgacgctggggagaagggtccatttgctgatgcggaaggttttgcccggccaggcgggaacctgaatgctgaactgcgaggcgtctttaatcagccaggcgatggattccgggaccgccacgctgacccacaccggatccatgccctgaattttcgccaccacgttatctttggcgatgttcattccggcgcgcagatcgaaggcggtaataacgccatcgatcggtgctttgagagtaaagcgggtctggattttacgcgtggctttcaggcggcggatatcgtcatccggcattccggcgagacgtagacgctcgaggatcccctcgacctgcgtagcggtgcccccggtctcctgcaatagcagatattcgctctgcgcttccacccagtccgggatggtcagctcgagcagcggcgtgccttgtttcactttgtcgccgacggtcagcggatagactttattgataaagcccgccgcccgcgcctgcataatcacatactggtactcgttatagctgatattggccgggaaggtctgagcgtagcgcagcggcccgcgggtgacggcggcggttttcaccccaagattctgggtctgcgtcgggtcgatacgcacccccggtgcaccggcggcggcatgctcctcatcggcgtatttcggcaccagatccatatccataaacggcgatttacccggtttatcgaagcgggtgttcgggtacatcggatcgtaccagaacagcactttacgctgctgctcggccgccggagcggcagagtgggtcggagcccatcgggcgtacagcgccgcggtaagcgcgccgccaatcagcatgctgccgaggatcagcgccgtatttttcagtgtcagggatgccatgtgtcgtccattcagttgttgaggggcctaccgtcgccgggccgttattgggcgcggatatcctgtaacagcgacaggttgccctgctgaacgaaggtgaagtccacgctgtcgccatccttcacattgttgagctgcgtctgcggggtgatggtgaagcgcatggtcatcggcggccagttcaccgccgggatggcctcgtgggcgatagtgatttttttgttatccatatcaatggctttaatgacgcctttgccgcggatgctttgcgtctgcgcggcggcgggctgctcgtgcatcgccatgctggcgtgcgggtcggcagcctgggcggcgaacaccgcgccagagagcagggtgaacagggcgattttagatagtgaattcatgttcgggactccttgggttattccatccagccgccgccgagagcggtgaacagggtgatttcatttgcctgacgggaatagttgagttccagcagggtttgtcgggtggtgaaaatatcgcgctgggcgctcaggacttcgatatagctgaccgcgccgtggcgatagagcgcagtggcgcgctgcagggtgatattcagcgaggcgagatagcgctcctgcgcggcaatttgatcggccaggctctggcgcagggccagcgcgtcggccacctctttaaaggcggactggattttttgttcatagttgaccacctgctgctgctggcggatctccgccagatcgaggctggcctggttgcgcccggcgttgaaaatcggcagttcgattttgggaatgaagttccacatcgcgccgccggcgttaaacaggctggagagttcgctgctgctgccggagagcgagctggtcagggtgatcgacgggaagaaggccgcccgcgcggcgccgatgttggcgttggccgcttgcaggctgtgttcggcttccagaatatctggccgctgcaggaggatcgctgaggagagcgatggcggcagggttacgccttgcaggtctaccgcgctgctggcgctatcgtccggcagatgttgatagctgccgagcagtagctgcagggcgttattggcctgcgccagctggccctgacgtttggcgatatcggcgcgggtgctttcgatcatgtcgcgcgcctgctccagcgccagcacggtggtgctcccggtcagcagctgtttttcaacgaaggcgtaagactgctgatagttctgtaaggtatcgttggccacctgcagctgcgctgccgccagccgctggttgaagtagctttgtgaaacgttagcaatcaacaggatatgcactgcgcgccgtgcctcttcgctggcgaagaagttctgtcggtcggcctcgctaaggtttttcagccggccaaagaaatcgaggtcatagctgaggtttaagccggcggcataatcgctgctggtggtggtgtcgcctttgagcttgccgccataggtggtgctgccgtcaccgttaagctgtgggtagcggtcggcgtcggttacccggtactgggcgcgggcttcctgcactttcagcgtcgccatccgcagatcgcggttgttggtcagcgcggtgctaatcaggcttttcacctgcgggtcgacgaaaaaggtgcgccaaccggtctcctggtagcccgctgtcgcagtaaccagcttgttctggctgagagagaactgctgcggcaccggcgctgcggggcgctgatagtccggagcaagtgacagacagccggttaaggtaaatatcacgctgagggtaagtagctgtattgagcgcatggcggcagaagtttcgacgatttatccatggcggctactttacgtagcgggctctgttcagggcgtgacgggaaaatgacaaagctgtcattttcctgatatttcattgctatccggaggcgctcctctaaaattgaatacccgcacaaagcgcgcgtgaaggagcctgccgtgaagattttgattgtcgaagatgagaagaaaaccggagagtacctgaccaaagggctcaccgaggccggcttcgtcgtcgacctggccgataacggcctcaacggctatcacctggcgttgaccagcgattacgatctgctgatcctcgacatcatgctgccggatgtgaacggttgggatatcgtgcgcatgctgcgcgccgccgggaaaggcatgccgatcctgctgcttaccgcgttgggcaccattgagcatcgggtgaaggggctggagctgggcgctgacgactatctggtaaaaccgttcgcctttgcggagctgctggcgcgggtgcgtactctgctgcgccgcggggcggcggtcatcgtcgaaagccagtttcaggcggccgatctcagcgtcgatttggtcagccgcaaggtgacgcgcggcgccacccgcatcaccctgaccagtaaggaattcacgctgctggagttcttcctgcgtcatcagggcgaggtgctgccgcgttcgttaattgcctcgcaggtgtgggatatgaacttcgacagcgacactaacgccatcgacgtggcggtgaagcggctgcgcgccaaaattgataacgacttcgagccgaagctcatccagaccgtgcgcggcgtcggctatatgcttgaggtgccggatggccgctaagcgccccttttccctggccacccggctgaccttctttattagcctcgccaccgtcattgccttcttcgccttcacctggatcatgatccattcggtgaaggcccactttgaagagcgcgacgttcacgatctcagacagctcagcaccaccctggagacggtcctcgaccacgctgactacccgcaggcgcggcgtctggagatcgtgaagaatatcattgcgggctacgccaacgtcttcatctgcctggacgatggccagggcaatattctcttccagtcgcccaacgggccggatctcagccatatgctgagtacgccggggctggcgatgcagctccgcgacgggaatgtgatttcatggaccgacccgcagccgcgggcaatggcgcacgataatcatccactggagacccgcgcctggcggctgatcatgctgccgctgggcaagcaggcggacggtaaaccggcgtaccacctgctgatggccttatccatcgattttcacctgcactatattaatgagctgaaagcgaagctgatctccgcggcgtcgataatcagcctgctgatcatcgccatcgtgctgtttgtggtctaccaggggcataagccgatccgccagatcagccgccagatccagaatattacctcgcgggatctcgatgtgcgccttgacccgcaggcggtgcctgtcgagctggagcggctggcgctgtcgtttaaccatatgctggagcgcatagaggatgtctttacccgccagtccaacttctccgccgatatcgcccatgaaatccgcacgccgattaccaacctggtgacgcaaaccgaaatcgccttaagccagagccgcagcccgcaggagctggaagaggtgttgtattccaatctcgaagagttctcgcggatgtcgcggatggttagcgatatgctgttccttgcccaggccgataacaaccagctgatccccgaacagcgggcgctggatttggccgatgaagtgcataaggtgtttgagttctttgaggcgtgggcggaagagaaagcggtggcgctgcgttttgtcggtagcccctgccgggtgacgggcgatccgctgatgctgcggcgggcaatcagcaacctgctgtcgaacgcgattcgctatacgccggccgggcaggcggtgaccatccagttgagcgaaagcgcggagacggtacgcctggtggtggagaaccccggtatgccgattgccgccgagcatctgccgcgcctgtttgaccgattctatcgcgtcgacccctcgcgccagcgcaaaggggagggcagcggcatcggcctggcgattgtgaaatcgattgtcggagcccaccacggcagcgtggcggcgcagtccgatctgcgctcgacgcggtttattgtgatgttgccgaaataggcgcaatccgcgagtgatagttgagtatgtggctttctgtcgctatattgaatgtacggaaaataaccgtacatgaagtttgcaacaggccggagataacgtatgcccgcacttaaaaagcagcgtatagatttgagattaaccgatgatgataagagcatcatcgaggaagctgcggcaatttcgaatcagacgattacccagtttgtggttgccagtgcctcagaacgtgctgcggaagtgattgagcagcaccgcagaatggtcctcaatgagcaatcatggagcctggtgatggaggcgattacccaaccgccagccccgaatgatcgactgaaacgtgcagcgaagcgtctacaaaccaggtaaggtagagctaatggagcagcaactgacgattgagatgattgccgatgcgttcagctacgatatcactggatttgattgcggcgaggaagcgctgaatacgtttttaaaagagcacctcaagcggcagcacgatggacaaatcttaaggggttatgcgctggtctccagggataccgttcccaggttgctgggttattacaccttatcggggagttgtttcgagcgaggcatgttgccgtctaaaactcagcaaaagaaaatcccgtatcaaaatgcgccaagcgtaaccctcgggcggctggccattgataaatctgttcaggggcagggctggggagagatgttggttgcccatgcgatgcgagtggtgtggggagcgtctaaagccgttggcatctacggattgtttgttgaagcccttaatgagaaggctaaagcattctatcttcgtctggggtttatacagctcgtggatgaaaatagtaacttactgttttatccgaccaaatcgattgaacagctctttactgacgatgagtcataaaagaaaccgggcagcgccaggcggctgcccgcagtatcgcgactctcttactcttcgaagtaccagtagccctgattaatcagccgcgtcagttcgctcacgaacgccggattctgcaggccgctgccgagctcttcctggcctaatgaggtatagcgacacagcgcatccagcgcttcggcatcggtggtgtcgagttgttcgctatgcacgaagaagctgtcgccgatatgcagaacgcgcaggccgctcaggcgggaaagcttttcaccacccagcagcgcatcgaccacttcctcttcttcatacggtggttccgccggcgcaatatccagctcgtgacgcggggtggtgacgaaactgccgaaccactgcttgaagtcttccggctggcgaatcatatcgatcatcatggtgcgcagacgttcgagttcatactcttcaacccggcccggatgctcgcggcaggtgaggtccggatcgctgtagtgctcgtcgccgagatcgttctccagcacatagtcggcgaagctgctgatcaggtcgcggccgtttggcccgcggaagccgacggagtagttcagggcggtttcgtgggttatgccgtcgtgcgggaatcccggtggaatatagaggatgtcgcccggctgcagatcttcatcaatgatcggtgggaacggatcgacgtgcagcagtgccggatgcggacagaactgacgcatcggcagcttgtcacccacgcgccagcggcggctgcccatgccctgaataataaagacgtcatactgatcgatatgcgggccgacaccgccgccggggacggagaaggagatcatcaggtcgtccaggcgccagtccggcagtacgcggaacgggcgcaccagctcggcggccggcatatgccagtggtttaccgcctgggccagcagggaccaaccggtttcgcccagcccgtcgaaatgttcaaaaggaccattgctggcctgccatttgccgtttttcaggctgaccagccggctgtcgacttccggctccatggctaatccggccagctcgtccggagtaatcgggtcgacgaagtccggaaacgcgttttttaataccaccggctgtttctgccagtatttttctaaaaactcgggccagttaatgttgagttgataagccatcgattattaccagtaagaagaaacgggcctgattatagaaatgagggccgggcgggcgcattgtcgtgggtcaagagtggtgcttaattcaccatcggcgcgataatggcgttgggtaagagagaaaaatcacatttttgccaaaaaccgatcttagcgtaaattgcgctgcaggccgcatgagcactgggattgagcctttaatggtaagaagatgaattcgcgaaaagttcaaataatgagcggtcgataagatttttctattttaacgcttgctacttccgacgaactccctataatgcgctcccactgacacggcggatgtgaatcacttcacacaaacagccggttcggttgaagagaaaaatcctgaaaaacgggttgactctgaaagaggaaagcgtaatatacgccacctcgcgacagagcgctaaagcgcgtcgcaactgctctttaacaatttatcagacaatctgtgtgggcactcaaagtgacatggattcttaacgtcctcggacgaaaaatgaataccaagtctcaagagtgaacacgtaattcattacgaagtttaattctttgagcatcaaacttaaattgaagagtttgatcatggctcagattgaacgctggcggcaggcctaacacatgcaagtcgagcggtagcacagagagcttgctctcgggtgacgagcggcggacgggtgagtaatgtctgggaaactgcctgatggagggggataactactggaaacggtagctaataccgcataacgtcgcaagaccaaagtgggggaccttcgggcctcatgccatcagatgtgcccagatgggattagctagtaggtggggtaacggctcacctaggcgacgatccctagctggtctgagaggatgaccagccacactggaactgagacacggtccagactcctacgggaggcagcagtggggaatattgcacaatgggcgcaagcctgatgcagccatgccgcgtgtgtgaagaaggccttcgggttgtaaagcactttcagcggggaggaaggcgctaaggttaataaccttggcgattgacgttacccgcagaagaagcaccggctaactccgtgccagcagccgcggtaatacggagggtgcaagcgttaatcggaattactgggcgtaaagcgcacgcaggcggtctgtcaagtcggatgtgaaatccccgggctcaacctgggaactgcattcgaaactggcaggctagagtcttgtagaggggggtagaattccaggtgtagcggtgaaatgcgtagagatctggaggaataccggtggcgaaggcggccccctggacaaagactgacgctcaggtgcgaaagcgtggggagcaaacaggattagataccctggtagtccacgccgtaaacgatgtcgatttggaggttgtgcccttgaggcgtggcttccggagctaacgcgttaaatcgaccgcctggggagtacggccgcaaggttaaaactcaaatgaattgacgggggcccgcacaagcggtggagcatgtggtttaattcgatgcaacgcgaagaaccttacctggtcttgacatccacagaactttccagagatggattggtgccttcgggaactgtgagacaggtgctgcatggctgtcgtcagctcgtgttgtgaaatgttgggttaagtcccgcaacgagcgcaacccttatcctttgttgccagcggtccggccgggaactcaaaggagactgccagtgataaactggaggaaggtggggatgacgtcaagtcatcatggcccttacgaccagggctacacacgtgctacaatggcatatacaaagagaagcgacctcgcgagagcaagcggacctcataaagtatgtcgtagtccggattggagtctgcaactcgactccatgaagtcggaatcgctagtaatcgtagatcagaatgctacggtgaatacgttcccgggccttgtacacaccgcccgtcacaccatgggagtgggttgcaaaagaagtaggtagcttaaccttcgggagggcgcttaccactttgtgattcatgactggggtgaagtcgtaacaaggtaaccgtaggggaacctgcggttggatcacctccttaccttaaagaacctgcctttgtagtgctcacacagattgtctgatgaacgtaaagaagcaaggcgtcttgcgattgagacttcagtgtccccttcgtctagaggcccaggacaccgccctttcacggcggtaacaggggttcgaatcccctaggggacgccacttgctggttcgtgagtgaaagacgcgtgccgaactatctcaaaactcatcttcgggtgacgtttgagatatttgctctttaaaaatctggatcaagctgaaaattgaaacgacacacagttaatgtgtgttcgagtctctcaaattttcgcaatcagaagtgaaacatcttcgggttgtgaggttaagcgactaagcgtacacggtggatgccctggcagtcagaggcgatgaaggacgtgctaatctgcgaaaagcgtcggtaaggtgatatgaaccgttataaccggcgatgtccgaatggggaaacccagtgtgattcgtcacactatcgttaactgaatacataggttaacgaggcgaaccgggggaactgaaacatctaagtaccccgaggaaaagaaatcaaccgagattcccccagtagcggcgagcgaacggggagcagcccagagtctgaatcagcttgtgtgttagtggaacggtctggaaagtccgacggtacagggtgatagtcccgtacaccaaaatgcacaggttgtgaactcgaagagtagggcgggacacgtggtatcctgtctgaatatggggggaccatcctccaaggctaaatactcctgactgaccgatagtgaaccagtaccgtgagggaaaggcgaaaagaaccccggcgaggggagtgaaaaagaacctgaaaccgtgtacgtacaagcagtgggagcaccttcgggtgtgactgcgtaccttttgtataatgggtcagcgacttatattctgtagcaaggttaaccgtataggggagccgcagggaaaccgagtcttaactgggcgttaagttgcagggtatagacccgaaacccggtgatctagccatgggcaggttgaaggttgggtaacactaactggaggaccgaaccgactaatgttgaaaaattagcggatgacttgtggctgggggtgaaaggccaatcaaaccgggagatagctggttctccccgaaagctatttaggtagcgcctcgtgaactcatcttcgggggtagagcactgtttcggctagggggtcatcccgacttaccaacccgatgcaaactacgaataccgaagaatgttatcacgggagacacacggcgggtgctaacgtccgtcgtgaagagggaaacaacccagaccgccagctaaggtcccaaagtcatggttaagtgggaaacgatgtgggaaggcacagacagccaggatgttggcttagaagcagccatcatttaaagaaagcgtaatagctcactggtcgagtcggcctgcgcggaagatgtaacggggctaaaccatgcaccgaagctgcggcagcgacactatgtgttgttgggtaggggagcgttctgtaagcctgcgaaggtgtgctgtgaggcatgctggaggtatcagaagtgcgaatgctgacataagtaacgataaagcgggtgaaaagcccgctcgccggaagaccaagggttcctgtccaacgttaatcggggcagggtgagtcgacccctaaggcgaggccgaaaggcgtagtcgatgggaaacaggttaatattcctgtacttggtgttactgcgaaggggggacggagaaggctatgttagccgggcgacggttgtcccggtttaagcatgtaggctggttgtccaggcaaatccggataatcaaggctgaggtgtgatgacgaggcactacggtgctgaagtaacaaatgccctgcttccaggaaaagcctctaagcatcaggtaacattaaatcgtaccccaaaccgacacaggtggtcaggtagagaataccaaggcgcttgagagaactcgggtgaaggaactaggcaaaatggtgccgtaacttcgggagaaggcacgctggtgtgtaggtgaagtccctgcggatggagctgagaccagtcgaagataccagctggctgcaactgtttattaaaaacacagcactgtgcaaacacgaaagtggacgtatacggtgtgacgcctgcccggtgccggaaggttaattgatggggttatccgtaaggagaagctcttgatcgaagccccggtaaacggcggccgtaactataacggtcctaaggtagcgaaattccttgtcgggtaagttccgacctgcacgaatggcgtaatgatggccaggctgtctccacccgagactcagtgaaattgaactcgctgtgaagatgcagtgtacccgcggcaagacggaaagaccccgtgaacctttactatagcttgacactgaacattgagccttgatgtgtaggataggtgggaggctttgaagcgtggacgccagtctgcgtggagccaaccttgaaataccaccctttaatgtttgatgttctaacgttggcccctgaccggggttgcggacagtgtctggtgggtagtttgactggggcggtctcctcccaaagcgtaacggaggagcacgaaggttagctaatcctggtcggacatcaggaggttagtgcaatggcataagctagcttgactgcgagcgtgacggcgcgagcaggtgcgaaagcaggtcatagtgatccggtggttctgaatggaagggccatcgctcaacggataaaaggtactccggggataacaggctgataccgcccaagagttcatatcgacggcggtgtttggcacctcgatgtcggctcatcacatcctggggctgaagtaggtcccaagggtatggctgttcgccatttaaagtggtacgcgagctgggtttagaacgtcgtgagacagttcggtccctatctgccgtgggcgctggagaattgaggggggctgctcctagtacgagaggaccggagtggacgcatcactggtgttcgggttgtcatgccaatggcactgcccggtagctaaatgcggaagagataagtgctgaaagcatctaagcacgaaacttgccccgagatgagttctccctgagactttaagtctcctgaaggaacgttaaagacgatgacgttgataggccgggtgtgtaagcgcagcgatgcgttgagctaaccggtactaatgaaccgtgaggcttaaccttacaacgccgaagatgttttggcggattgagagaattttcagcttagattcagagttgagtacgcaatataaagaattgcgtactgagcacaaagaatttgcctggcggcactagcgcggtggtcccacctgaccccatgccgaactcagaagtgaaacgccgtagcgccgatggtagtgtggggtctccccatgtgagagtagggaactgccaggcatcaaataaagcagaaagcccggtcgaaagaccgggctttttgtttttgcgtttaaaaagaaccccgccccgaaaggtgcggggttttttgctgtgtggggtatatctcccccggtggcgctgcgcttaccggggctacaaaaccgtaccccggacaaagtgcgcagcaccgcctttattgcttcgcaaaatagcgtgacgaatgcttgtggcatggtcaaccggatagtgaatttaccggatgatacaagtcggaaaataattatcagcagctacgattaatattatctctttatttcagcgccattatattgtgccccggtaaaataatgatgcggcctcttcctcccacaaaataacgcgtttacgcttcagaaaaaatatttccgtgactggatacttcgcttccggatgtattgtggcgaacggtatgcttcttccctgtttttgtctaaatgagctttatcattaacactttgttaacttgatctggtttatatggcagcaaatttgatatacaaagagggatgattgcctgtatggatgctgcccgaaatgccttgcgagacatatgcaggttctcggctggcaaatgagaatagaaatgaaaatcctgcttaactggtcgccattgcgccagctcttcacttacattcaggagcgctttacctttctggtgctgctctgctggccagcgattatctggttgttctgtcgggtcggcgtgtggctcaccgataacgtttatgaactgctgggaaaatcacccgcccagtccttcaccgtgtatctgcagccgtttatgacccccggcacgctgctgcgcatctccatcagctgggtggtgttgctgttcattctcttcagtatggcgatggccttcacctggggtttacgtcgctttatgaatcgccataaataaaccattcggccgccgtaagtcgacggcccttcttaagcctttatgccatctcaccgatagtcttacgaaaacgcagcaacgcgatactaaagaacactccgccgatagccagcaaggttaagaactgcggccagacgatggcgaagctggcgcctcgatacaatatcgcctgcgccaggctgacgaagtaggtggtcggcatggtcaacataatatcctgtaccagctgcggcatactttctcgcggcgtggatccgccggagagcatctgcagcggcagtaagaccaggatcatcagcagccccagctgcggcatcgagcgggcgagggtgcccataaaaatgccgatcgaggtagtggcgaacaggctgagcgccacccccagcataaacaggggaatcgacccttcaatgggcacctgcaaaatcccctgtaccatcagcaccagcgacagcccggagaccaccagcaccaccaggcccatcgaccagatcttggccatcatgatttcaaacggcgtgaccggcatcaccagcagatgctcaatggtgccatgttcccgctcgcggatcagcgccgaaccggtgaggacaatggccagcatggtgatattgttgatgatcgccatcaccgcgccaaagcgctcctgctcaaggttaggattaaaacgcatcctgaccgccagctctaccggcagcacgctgttatcccgatagcgggcgataaaactgtttacttcgccggtgataatattctggatgtaaccgttgccggtaaaggcctgactcatgcgcgtggcgtcgacgttgacctggatttccggctgccgaccggccagtacatcgcgctggaagttaggcgggatgttgatggcgaacgtgtagcgcccggcatccagcccggcatccatctcatcagcggtgatcagctccggctcaagaaaccagggacggtagaaagcgttaatgatgcgtgaagagagctgggatttatccatatcagcaaccgcgatcggcgccaggtgcagcgaaccgggcatcaccgtggccgaggagtacaccgacacggtaaacgcaaacacgatcagcgccagcatcgctttatcaccgagcaggctgcgcagctctttgacgccaagattataaatattgcgtaatccgcgcatcatccctcctgtttctgcagcagcagcacgctcaacccgagcaccagcggcaccgcaatcagtagcggaatgaatgagccccacaaatcgctaatattcagcgctttcgaaaaggtcccgcgggcgatagtcaggaagtggctggtcgggtagatttgcccaatccagcgcccgggaccttccagcgaggccaccggatcgatcattccggaaaactgggttgccgggatcagcgtaataatcgcggtaccgaaaatagcggcgatttggctcttcataaaggttgagatcagcagccccagaccagtggcgatggtgacatacagcagcgccgccagggtcagcgtcaggaaactccccttatgcgcgacgccaaagacaaagaccgacagcgcgcacagcaggaagaagttaaacatccccagtacgatgtaaggcagctgcttgccgagcaggaactcgctacgggtggtcggcgtcacgtacaagttgataatcgacccgagctctttttcacgtactacgctcagggcgctgagcatcgccgggatcatcatcagcagcagcgggatcaccgccgggacgatggccggcaggctcttcacgtctggattgtagcgatagcgggtctcgatggagatgagcgaggtatcgcgctgcgggctgctctgccggccggccatctcctgcagccaggccagatgcatcgcctgtacgtagccgcgcacggtttccgcgcggttgggcatcgcgccgtccacccacacgccgatttgcaccggcgtgccgcgggcgatatcgcgaccaaagttcggcgggatctctattgccaccgccagctcgccatcgcgcatccggcggtccagttcgtcatagctgtgcagcggcgcctgctcgataaagtagcgtgaaccggctatgttctgcgaccagccctggctgctgagggtttgatcgcggtcgaggacggcaaagcgcagatcctcaacgtccatgctgatcccataccccatgataaacatcaggatcaccgtccccagcagcgccagcgtcgatcgtaccggatcgcggcgcagctccagcgcctcgcggcggctatagctaaacagccggcgaagactgaaggcctgccgtggagccgtgtgtccggaatacgatgccacagcagacgtgggttcttctggtactggagaggacggctgggcctctttaagccaggcgataaacgcctcttccaggctgtttgaaccgcgctgctcgaccagcgcctgcggcgtatcgctggccagcactttgccggcgtgcatcagggagatacgatcgcagcgttccgcctcattcataaagtgggtggagataaaaatggtcacctgatcctgccgcgcgaggtctaccatcagctgccagaacatatcccgcgctaccgggtcgacgccggaggtcggctcgtcgaggatcagcatctccgggcggtggatgaccgccaccgctaacgacaggcgctgacggatccccagcggcagatcggcgggaagcgcgtcttcaacctcggtcagcataaagcgctcgctcatctcagcgacccggtgggctatttcgtcatccgggatatgaaacaggcgggcgtgcagctcgagattttgccggacgctcagttcgctatagagcgaaaaggcctgcgacatatagcccacccgctggcgggtggcgatatccttcgggtcgaccggctggccgaacagccaggcttcaccttcgctggcgggcagcaggccggtgagcatcttcatggtggtggatttgccgcagccgttagatccaaggaagccaaagatttcgccgcgggcgatgcgaaagttaacgtggtcgacggccacaaagttgccgaagcgcatggtcaggccgcgcgcttcgatagcgatctcttcctcacggctgtcgcgcggtgggataactaccgccctatgcgcctgacgctgtgcttctggcagcagggcgataaacgcctgctccagggtctggctgccggtctgggctttgagctctgcggcgctgccggtcgccagcacctcgccggcgttcatcgccaccagccagtcaaagcgctcggcctcttccatgtaggcggtggccaccagcacgctcatcgccggctggcgctggcgaatactgtcgataagctcccagaactgcgcccgggagaggggatcgacgccggtggtcggttcatcaaggatcagcagctgcggatcgtggatcagcgcgcagcacaggccgagcttttgcttcatcccaccggagagttttccggcggggcgatcgcgaaacggcgccagcccggtactctgcagcagctcgttgatgcgcagttcgcgttcggctttatcgtggccgaacaggcgggcgaagaagtcgacgttttcatacaccgagagagtgtgatagaggtttttccccagcccctgcggcatccacgcgattttcggacacacctcgcggcggtgatgcacatcgcgcatatcgccgccaagcaccatcacgttcccctgctcgatggtccgcgccccggcgatcagcgaaagcaggctcgatttgccgacgccgtccgggccaatcaggccaaccatacgccgtgccgggatcgccagactgatatcgcgcagcgcgatggtggcgccaaactgctgaccaacgtgttccagcagggcgacggggggcgaggtatcctgcggcgttagtttcattgcggcaacctcaccgccagggcttcaggccagggttgttgtttatccagccgtacgtaagccataccgggcaggccggttttgacatactccaggtgctgcgccagcagctccggcgggatacgcgctttgacgcggaacattagcttaaggcgctcgtcgctggtctcgaccgttttcggcgtgaactgggcgacgctggcgacaaagctgatattggccgggatcaccagatccggcgcggcatcaaggaccaagcgcgcttcgctgccgagcgccagcagacctgcctgttcggtgggcagaaaaaaggtcatatagacatcggcgagatcgaccatgttcagtacccggccaccggcggccaggacttcgcctggctcagcgacgcgatactgaatgcggccatcgcggggggctttcagctcgctatcgtcaatatcggcgaggatccgccgctcggtcgcctgggcggcttcgacgcgggtttgcgcctgaataatgctggtgcgggcagcttcgatggcggcgcgggcggcggagacctgggctttcgccgattccagcgccgcgcgggcgctctctgcggccgcgcgatcgtcatccagctgctgggcggagacggcgccacgctgggagagggtgttggagcgaacatggcgtttcgccgtggaatccagctccgcctgacgctgcttcactaccgcttcgctggcgcgcatttcactttgtcgctgatcgagcaaggctctggcggccaggaccgcgctttccgcctccttgatttgcgcggcggcttcaagacgctgctcgttcagtacccgggtatccattctcgccagcacctctccctggtgcacgaactgaccctctttgaccagaatggtgtcgatacgcccggcgattttactggcaatatcaacttcggtggcttcgattcggccgttgctgctggcaaaccccgccgggagtcccggcgggcgcagcagccaccatgcggcggcggcgagcaccaccagtaagccgacaaaataccctgcccaacgtttctttattttgtccatacgcgactcgcttgattccctgtgctgagtggtgcgcgtgtttcctccggcgggcggagcgtccttcttgcgaaggacgaaaaagtggagggagggccgctgacgccgcgctctgccgcgccgatgcgcagccgctcgctgggctacttatgtggtcatcatcagcgatcctggccttaatgaaacacgcatagtgagagctaccgttaacgcgatagtaacagccggggcgatattgtccatacgaaagacagggtcttgtcggcgtgttaacaaaattatccgcacagggagtatttcaccatctcagaacagcaccggcagacccagcccacgcttcacctcatgcagcgtctgctgtgtgaggtggtgggcgcgttcgctgccctggcgcagcagctccagcagcatccctttatcctgaataaaagtgaccctgcgttcgcggatcggcgccagtagcgtctgcaagcaggtctccagctcattcttacactggcgatcgcccagcccgccgcgctgatagtgggctttcatctctgccacccgcgccttatcgctgtggaatgcatcgagataggtaaacaccacgttgcccttgacatgccccggatcgctgactctcaggtgcgtcgggtcggtatacatcgcgctgaccgcgtggtggatctcctcctctgtggccgataacgtcagcgtattgcccagcgatttcgacattttggcgttgccatcgacgcccggcaggcggctcacttcgctgagtagcgccttacagtggcgcagcaccggctcgccggtgaggctattcatcttgtggacgatctcgttggtctgctcaatcatcggtagctgatcgtcgcccaccggcaccagctcggctttgaaggcggtgatatcggccgcctggctaatcggataggcgagaaaacccaccggcagcgagcgggcgaatcccttctgggcaatctcatttttgaccgtcggattacgttctacgcgggcgacggtgacgatattcatatacagcgcgctgagctccgccagcgccggcagggcggactgcaggcaaatagtggtgagcctggtgtcgatgccgacggccagataatcggccatgacttcgaggatatggtggctgattttttgcggattgctgccgttgtccgtgagcccttgcaggtcggcgatcaggataaattgctggtggttatgctgcagcgcgacgcgctggcgcagcgagccgacgtagtggccaagatgaagttggccggtcgggcggtcgccggtgaggatggtttgtggatggttcatcagggactccttatcagactgttcagccgaaagacgtcctgaaaacaccaaagccgccttccggcggctttgaaaatggaaacgtgtatcgtgccgcctgttatgcaggcagccaccaacggcggggataggtaacgataacgtttctgttcatagggagtatcctgccacggaaggggctggaggcgcaatcaaaaatcacatacttttcctgatgttatttatgtgattgtttttcggtaaataacgaagcgggaaaaatatattttctctgcgacccgatcattattctggaacaacaaagtatgttgcattttttttgtgaaaaagctcacgccacaggattatagtattattannnntatttatagctgaatattacctgtctgctgttacagcttgtgtttattctcttctaaattattaacattattacaatttctatctatttttccgctttgcgtcatacccctgtctgactacaacgtattgaggctaattattatgcataaacgtctggtcgttaatattttttcatccttgctgttgggggctgcgcttatttccgcgccggtatatgcggcggaaaaaaccgtagtcaatatttcaaaagtggacggcatgccatggtttaaccggatgggtgaaggggtagtccaggccgggaaagagtttaacctcaacgcctcccaggtagggccgtccagcaccgatgcgccgcagcaggtgaaaattattgaggacctgattgcacgtaaagtggatgccatcactatcgtgcctaacgatgccaacgtgctggagccggtattcaaaaaagcccgtgacgccggcatcgtggtactgaccaacgaatcgcccgggcagccgagcgccaactgggatgtggagataatcgataacgagaagttcgctgctgaatacgtggagcatatggccaagcggatgggtggcaaaggcggctacgttatctatgtcggtagccttacggtaccgcagcacaacctgtgggccgatctgctggtgaaataccaaaaagaacattacccggacatgcatgaagtcacccgccgaatgccggtggcggaaagtgttgatgattcccgccgtaccacgctcgatctgatgaaaacttacccggatctgaaagcggtggtctcttttggttcgaatggcccgattggcgcggggcgcgcggtgaaagagaagcgtgcgaaaaataaagtcgcggtctacgggatgatgatcccctcgcaggcggcctctcttattaagagcggcgatattaccgaagggatcacctacgatccggcgacagccggctatgccctcgcggccgtcgccagcaccctgctgaacggcaaaaccattgagccgggatttgaactgaaagagctcggtaaagcggaggtcgatagcgacaagcatattatccgcttccataaagtgctgctggtaaataaagacaatattgattcgctctactaatccaccttccggggcgccagccgccccggcttaaccagccaggggatgctatggaacctttcctttcccttcgacacgtcagcaaaaccttccacgccaaccgcgcgctcaatgatatcagcatcgactttatgcccggagaagtgcactgcctggccgggcagaacggttgcgggaagtcgacgttgatcaaaattatctctggcgtctatcgcccggatgagggcgcagcgatgacgctgggcggcaagacgtggcccaaactgacgccagcggcctctgtcgcccatgggatccaggtgatttatcaggatctgtcgctgtttcccaatctcagcgtgtgggagaacattgctataaaccactatcatcgcggcgtgctggtgaggcgcagcgaactgcgacgcagtgcggagcaggcgatgcgcagtattaacgtctcgctgccgctggatgccgccgtggaatcgctctccatcgctcgctgtcaactggtggctatctgccgcgcgctggcgcaggatgcccggcttatcattatggatgaacccacggcctcattgacccatcaggaagtggagggattattgcatgtggtgcgccagctgcgtgagagggggatctgcatcgtcttcgtaagccaccgtctggaagaggtcatggccgtatcggaccgcatcagcgtgctgaaggatggcaatctggtcggcaccttgccggcggcagaggtaaccacccgccggctcggttttctgatgacgggccaggagtttgactttcaggtgcgcgatctgtggcaggggcagggcagtacgccggtgctggaggtgcgcaatctcagccgcaagggggaatatcataacgtctccctgaaggtcgaagccggagaagtggtgtcgatagtcggcctgttgggcgccgggcgaacagagctgtgcctgagccttttcggcatgacctgccctgacagcggcgagatcctgataaatggccagccggtgcggttgcgtagcaatcaggacgctatccgccacggtatcggctatgtctccgaggaccgtatgtcgcgcggcctggtgatgagtcagtcgattgaaaacaacattatcagcaccgtgtttcataaagtgaaaggcgcttgcggactattgagtgatagtaaagctcagcagctggtcgcaagaatggtcaacgcgttgaccattaaggcgccggatacgcatctgccggtgaataccctctccggtggtaatgcccagcgcgtttctatcgccaaatggctggcgatctctcctaagctgctgatcctcgatagcccaaccgtgggggtggatatcgcaaacaaagccgggatctatcatatcatcagcgatttggctgcccatggtatcgccgtgctgatgatttgcgacgagattgaagaggcgtggtaccagagtcatcgcatcctggtgatgaagcagggcgagttgacccatagcttcctgccggacagcagtacccagcagcagatagcggaggtggtcaatggctaatctgttgaaacgacatgaattctggttaggcatgttcattactgcgctgtgcctgctgctgggctggcgcagtgaggaatttttcactttcggcaatctttacgacctcgctaataactatgcgatgctgaccattctcgcctgtggtctgttcgtggtgctgatcgccggcgggattgatatctccttcccggctatgaccattatcgcccagtacggcatggtggtgatgctgcaaaaagtaggcggcaacttcgcggtggcttttgtgcttgccggcggcatcggcgtgctgctggggctggtgaacgcgctgttggttaatcgtctgcgggtcccctcgatcattatcaccatttctacgctcaacattttctacggtttgctgctgtggttaagcaaaggtgtctggctctacgacttccctccgtggtttgaaaagggggttatgctgttcaaatataccgatgccgatggttacgattacggtctggggctgccgctgctgacgatgatcgccgtggtgctgttgaccgcgtttatcatgaatttcaccaccgttggccgcaagatctatgccatgggcggcaaccgggaatccgccagccgcgtcggcttcagcgtgctccgcctgcagctgttcgtttatggctatatggggctaatgtcgggggccgcaggtgtcgtgcaggcgtggacagtgatgaccgttgcgccggattcactgctgggctatgagctgacggtgctggcggcggtggtgctgggcggcaccagcctgattggcgggcgcggaactctcaccggtacgctgctgggggtgattttactggcggtgatgcagaatggcctgaacctgctaggggtctcctcctactggcagaccctgatcactggggcgatcatcgtcgtcagcatcagcgtaacggcatggagccagcatcagaaccggagcttgttatgaaaaaatcgtggcgcaacaacgttgagttttacctgatcggcctgctgctgctgatggttatcgcctttagcatcgccatgccaaacatcttctggtctgtcagcaatttccagtcgattgcctcgcaaatgccggtgctggggatcctggcgctggcgatggccatgactatgctttgcggcggcattaatttgtcaattatcgcgacggctaacgcctgctcgctggtgatggcctgggtggcgacgagctatccgcctgggggcgctaccgcgctggcgacgctgctggccggcggaggggcggcgatgatcattggcctgtgcaacgggatattgatcgccgggatccgcgtttcgccgatcctggctacccttggcatgatgaccctgctcaaagggataaatattctgatcaccggcggcagcgccatcgctaactatccgcagtgggtgctgtggctgaatcacgcccagtggttcggtattccgctgccaatgtggctttttgcggtggtggcggccgggctgtgggtgctgctggagaaaagcccgctgggtcgggcgatcatgttgatcggatccaacgaacgggcgacccattattccgggatcaatacccggcgggtgttgatgtgggtatatgtcatctcggccctgctctgcgcggtggctgcgtttctgatgatgtcgaagctgaactcagccaaagcatcttatggggaatcgtatttgctggtgtcgatcctcgcggcggtgcttggcggcgtgaatccggatggcggtagcgggcgcatcgttgggatggtgctcgcgctgttcctgctgcagattattgagagtgggttcaatatcctcggtatcagcccctatctgacgatggcgctgtggggcgtattgctgctgtgctttatccaggcgcgaggcatgctgggactggagagagccgggtaaatgacccgtcctcggggcgaagacgggatagccagttattcgctacgcaaatgcaccgccaggccgctttgccctggcgccagctccgggcgcagcgtcagcgacgggatcagataatcgccatgattctgccggcggaatggaatgggctcggtttgccacagcgtgtccagccgctcggccagggcggcgcactgatcggcgaactgcccggcatcggttttatccgtgcggtagaacaccagcggcggaagcacctcaaagccgggatagaacagcataccgtgctgaatggggaacaggatgtcgtcgatggggccattgatcccgcgcggtgaatagtgttctgcccagccgccggcggtgacgatcagcatcgcccgtttgccgacgaaagtgccttccccgtagcgatcgccccagtggcggtcgctgtgctcgccgacgccataggcaaagccccaggcgtacacccggtcgatccagcccttcatgatggcgggcatcgagaaccaccatagcgggaactgaaaaatcactgtatcggcccacagcagcttttcctgctcggctacgatatccgcactttgggtgccctgggaaaaggcctgtttggaatcgagggtcggccgccagaactcgccgaccggcggcgcgccgctgtcgtcggcgtcatacccggccttccagcgcatggcatagagatcggaaacctgcacttcatgcccggcctgctgcagatggcggatggcgaaatttttcagcgcgccattgagcgagcgcggttccggatgggcgtaaatcagcagtactttcataatatcacctctggcgtatggagagctgcagagtaggaaagctgacgctatagtagaaattaattacttaaattcccggtatagtcgtgattaatttacagcgtctggatctcaatctgttgcgcaccctggatgtgctgcttagcgaaaacaacgttacccgggcggcgcagcggctgaatctgtcgcagccctcggtgagtattcagctcgccaggctgcgggagattttcgccgatccgctactgatgccgggcccgcgcggcatgcagcccaccgcccgcgccgatgagcttcgtcagccgttgcgcgctgcgttagccgcgctggagcaggcggtggcgccggtcagcccttttgatccggccacggcggcggagacctggcgggtggcggcgacggactatatggcctcggcgatcctcctgccgatgctggctgggttacgccaggcctctcccggcagtcggctggcggtattcgaactgcagccggcgcggctggagcagcaggcggccagcgatacagtagatcttttctttcatacccgcgagggcgcgccgccggggctgcatcagcgcctgctgtttcgcgaacgctacgtgctggctggccgggcggaacatccagcgctgcggcctgggcttagcctggaaacgttctgtcagctggagcacgtgatcgtctccccggacgggggcggcttcagcgcggcgaccgatatcgcgctggcgaacctcggactgatgcggcgggttgtcctttccgtgccacatttcctgtttatgctggagaccctgcgcaatagcgatctggtggcggtcctgccggagcggctggtgcgcgggcagagcgggctggtggtcgtcgagccgccgctggcggtcgccggctttgagatgctgatgctgtggcacgagcgctggcaccgcgacccggcgcatcaatggctgcgtcagttcattgtgaattcactagaggaacagacatgctgagtggactgaatcatctgaccctggcagtcagccagctggcgccgagcgtggcgttttatcagcagcagctgggcatgacgctgcatgcccgctgggacagcggggcttatctctcctgcggcgatttgtggctgtgcctgtcgctggatccgcagcggcgcgttactccgccggaagagagcgactacacccattatgcgtttagtattagcgaagccgattttgctagcttcgccgcccgccttgaggctgccggcgtggcgatctggaagctgaaccgtagcgaaggtgcctcgcactatttcctcgatcccgatggccataagctggagctgcacgtcggcagtctcgcccagcgtctggccgcctgccgcgagcagccgtataagggaatggtgttttttgatcagtgaagctgctacgcagacgttagatcacccgtagccccggtaagcgcagcgccaccggggagaacaggttaaattcactccatcgccaccttcaccgcttctcccagcttcaccatcaccgctttatgtttttcggtcggcggcagggcgcagttgatcctgacgcagttgcgatacttgcccgctgccgaaaacagcgagcccggcgcgacctggatcttcagccggcacagctgcttggcgacgcagaccatatctacctgctccgggagctcaacccacagcataaaaccgcccttcggccgggtgacgcagatcccgcaggggaaaaattcccgcagccagcaggtgtagatctcgatattgcgctgatagatctgccgcatccgccgcacgtggcggtggtagtggccttcgcgaataaaattgcaggccgccagctgagtggaggggacgttggtcccgctggcggcgtacttcatctgtagcagcttgtcgtagtagcgcccgggggcgatccagccgatacgcagcccgggggcgatggttttggtaaaggagctgcagagcatcacccggccgtcgatatcccaggagtggatcgtgcgcgggcgcgggtattcggtggccagctcgccgtaaatatcatcctcgaaaataacgatatcgtagcgttgggcaaggttcagcaccgcgcgcttgcgggcgtccggcatgataaagcccagcgggttattgcagtttggcacgaggatcacccctttgatcggccactgatccagcgccagctccagggcctcgatgctgatcccggtttccggatcggtggggatctcaatcgtctttaatcccagcccgcgcagcatctgcatggtgccgtagtagcagggggattccacggcgatgatgtcccctggctggcacaccgacagcagggccagcgacagcgcgctgtggcagccgctggtgagcaccagatcgtcggcagttaccaccgatccgccgtcgagcatcaggcgggcgatctgctcccgtagctcgcgacgcccggccagttcgtcatagttcaacacctcagtgaggttgtgctggatagcccggctcagttcacgccagatgggcttcaggcttggctgcgtcacgtccggcgagccgccgccgaaggggatgatcgatttatcgtagcgggcgtcaagcatggtcagcacctgatcccactgggtgatctccaccgggcgctggaccggacgcgacatcggcggcaccggcggctgggctttgcgcggggcgacgaaatagcccgatcgcggctgcggcacaatcatttgctgctgctcaagcagctgataggcctgctggacggtgctgatgctgacgccgtgctcctggctcaggctgcgcaccgacggcagcttttcgccatggcgatacaggccctgttcgatgcgttcggccagcagcgtagcgagatgttggtagcgggtcatgctgtatccttaattgccgccatacagatggaataaccagtacagatgggcgtaaaaattgggctctggtgtacgttttagctaatctgtatgttaaagaaaagcgttttgtgaatctgtattccttacccccaaatccgtgaagataaagcctctggcaaggtgaggaggtagaggatggaatttcacgagaacagggcaagacagccatttatcggtttcgtattgctggtgcggtttatcaaaaaatggtggcttcagcagcaaacgcgcagagttttgcagcaaatgagcgacgaacagctgaaagatatcggcctgcgtcgggaccagatcaattaaaacgtgcagttttttacaggcaaaccttcttcattatcccggtgagcgcaaagtgccgccgggatacattcacgaaatttatcaattgatgcggcacgagcttccgtttcttgatacttaccctgataagtattattttcttctcaataatgagaggaagacccgtgactgaagacgaactgtttgcccgccgcccgctggggatgcggatggctatggtggtgcgccagtggcgcgccattattgactccgctatcaccgataccggactcacccagtccagctggacggtgctgatgcaactgcatcagctgggagacaacgtctcggtcagcgaactggcggaggtgcagggcattgaactgccgccgctaatgcgcaccctctcattactggaaaagcagggctatctgatgcgttccacatcgccatatgacaaacgcattcgcctgctgacgctgaccgctgaggggcgggctattctggaaaaactgagctgcgtgatcgagacctatcaggagcgcgtaacccagaccatcccggaggccgatctcgccaccttcagcgccacgttaaatcaaatcgcctgccgtttgcggaatatccgcgaagaagataacaagatctaacacactatgatgacgcctgaacaaaaatttgcccgctgggtacgggtgagtattgccgcttttctgggaatattcgcctggtttatcgttgccgatatctggatcccgctgacgccggactccaccgtcatgcgcgtggtgaccccggtttcgtcgcgggtctccggctatgtctcgcacgtctacgtgcacaacaacagccaggtgaaaaagggcgacctgctgtatgagctcgacccaacgccattcattaataaagttgaagcggcgcagatcgccctcgagcaggcgaaactgagcaaccagcagctggacgcgcaaatcgccgccgcccgcgccaacctgcgcaccgcgcagtacaccgcgcgtaacgataaggtcacgctcgatcgctaccagcgcttgagtacgatgcagaacgtctcgcagtccgacctcgataaggtgcgaaccacctggcagaccagcgagcagtcggtctcggcgctgaacgcgcagatccagaacctgctgatccagcgcggcgagcgcgacgataagcgcaacgtcaccctgcaaaaataccgcaatgcgctggaggaggcgcagctgaacctggcctggaccaaagtgcgtgcggaaactgacggcatggtcagcaacctgcagctgaacccggggatctacgccaccgcggcgacggctgtgctggcattggttaacaacaacactgacatcgtcgccgacttccgcgaaaaaagcctgcgccacaccgcggtgaataccgatgcggcggtggtctttgacgccctgccgggtcaagtcttcccggcgcacgtgaccagcagcgacgccgggattctggcgggacaggaggcggtgaacggccagctgtcgcagcccgagcagtccacccgctgggtgcgcgacgcccagcggatgcgcattcacgtcgcgctggatcagccgctggacaaaccgctgccgaccggcgctcgcgccacggtgcagctgtacaatagcgagggacctttcgcccgcaccttcgccggcctgcagatccacctggtgagctggttgcactatgtctattaataccctggcgcacgtctttacgccgcacggcaatatcgtctacacggcgaatgattttcgccagacggtgcgtatcgccgtggccgggaccattgcgctcagcatctccaccttctacgacgtacagtacggcgtatttttcgtcgtttatccgctgatgctgatgtcgctggtaccgatgttcaacctgcacgtcgcccgccagtttatatttagcgcggcggtaaactgtgtcgaaatggtgctaattgtcggctatttgtcgcagtggccggtgatcatgaccctggtggtgtttgccctgtacgtgatgcgtttccgctttatgagccagggaccgctgttcctgttgggatcgatgggggtggtgtgccagagcacgatgctcaactttatgagctatcccaccagcaactggcacaccctgatgttctccaatatggaagcctgcgtgatggccgtggcgctgagcgcgctgctgcattacctgatcccggacgtcgaaccgcgcaagccgccgccgcggattgagaaagacgccgcccgcatccgtcatgagtcgctgctctccggtacggtagcgacgatcatctttgtggtgtttcagatctgcgatctcagcgactcgctgtcggcgctgatggccgggatcctgatcctgttcccgatgcactatcgtggggcggtgatcagctcgatctggcgcgtcgtcggggtggtgctggcctgtctctatatactggtggtgcagctgattatctatgatttcagcaaccacatgatcctgatgatgccgctgattggtctcgggctggccttcagcgcccgcctccacgtgatggagaaagtgggcgccggggtgggcttcgccagcatcactaccatcggcattatgttcggccagaacctgcatccgtatcaggatctggtgttcagcgatctgtaccgcatcacctcggtgacggtctcgctggtggtgacgctgaccctggtttttctcatgcaccgcctgctgaactgtttcgcggcgacgcgctttgtggtgagcgattaatctgcaggtgggaaggtggcgagacagcgccatgcttccccgttctgctgatacagcgccgccgtctgttccgggacgatccagcctcgcgcatcggcttccgtcccctccagcaggatgcacagcccgcagccgctgcgcagctggcggggtatatctttgacctcgaaggctactcccgccgcctgcatggctttgcgcatccgaaccacccccaccgtggagtgaaataaaaacagaaacgttgtcatccgcgcctccgctggcgctggccgatcagcgccgcgccgatcgccccggcaaactgggcgtcgggatgggttgtcaccgccatgccgacatggctttccagcatccgggcaaaggcggcgcagtggctgacgccgccggtaaacagcagcggcccctgcgccgataagcggccgataaagttcgcgctgcgccgggccatggcgttaatcacccccgccagaatcgcctccggcgcgacaccggccgaccgcaggctaatgacctccgattcggcaaacaccgtgcacatactggtaatggcgtgcggttccacgccgtcggtaatggcgtccagttgttcgacgctggcgccgagggtgcgtgaaatgacttccagaaagcggccggtgccggcggcgcatttgtcattcatcaggaagtcgctgaggtttcccccggcgtccagctggataactttgctgtcctggccgccgatatcaatcaccgtgcgggtgtccggcgccagcaggcgggcgccgaggccgtgacaagagatctccgtcacctgcttatcggcaaaatccaccagctggcggccatagccggtgagggttaaaaaaggcgtctccgtgaggccagcgcgcagtgtctcccaggcctcgtggatggcgtcggcggggcgaaagggggtggggcagaggaagcggcgcacgatgacgccgtccgccagtaggatgccttttgtggcggtggagccggaatcaatgccaaccgtatagttcacgccagctccttacagcatttcgataaaggccgcgacgcgggtgctgagctggccgaggtccgctgtcgaatagtcggtttcaatcgccatgtaaggaagatcgtgccgttggcgcagatggcgtttaatcgccagcgattccacggcataggtatggcaggcctgcaaaatgacgtcgatcaccccgtcggcctgatactcctccaccatctggctcagcagctgcagacgctggtcgttgggggagatacaggagcagccgatggcgagatatttatcggttaaggcgtcgtagacgtcgccctcttccgccacgcagcgctcggtcgctttcgcgccggtgcagttctcatagccgaccacccagccgccgttttcctcgatggcgcggaccactttttccgccgcgccgccgatcgggcagccggtgatcaggatccgcggacgaggttccagccgtttaccctgctgccactcctgatggatgcgctccgccatggcatgcagttcatcaatcagggcggttttgtcgaaacgaaaagtggcgccgtacaccactttcaggatgtcgccgccgctgagcgccggcggattgagctgcccgagacgataaaagtgggccagcgcccggcgctcgcgatttttcaacacgatggcttcgcgcagcgccgcctcgctaatcggcgtgccaaaccgggcctcaatcacctgctgcaggcgcaggatctccgttttccacagtgcgcgcgaggcggcatcgctggcgctgttcggcaactgcatgacgtggaccgccttgaactcggccatgtactcatacattttctttttgccgtcgcaggtggtttccccaaccaccaggtcagagaaatagaagtagggacatttatcggttttgccgaagccgtagctgcttttgataagcgggcagaggttgcgcgggagatctttttccgcttcctcgatggtttcatcggaggttgagcacagcgagacgacaacggcgcccgccgccatggcgatctcctggggcataaaggtgcagtaagtgcccaccagcggtacgttctgctctttaagatccatgacggtgagaaagcccttctggcgagcttctgagaactggtcaaaaatggcgggtagatcggtgataagcgacatggttttccttccccgtacacgggagatgctgaaagagtcgccattatagccatggtgtatgcagggttttattgatctcctgcgtctgtacgcggtgttaatagacctttttcaaatccatctcttcctggatacgctcgctccacgcctgatgggtgcggatggcctcttcgataccggcgttgtaaaacagcggccccagctctttggcgataaagtcgacgaaaaattcggcgtcaaactgctccagttcgaggtcgaaggtctctgcgcagtacttgctgagcttgtcgcgcagcaggtcgcgctgcgcctggctgagttcaatgtcattcatgatggggctttctccgtaaaagggctcacgactgccgggcttcgatcaccgcttgtccgcgctggtggcgtaacagtccggccaggcagcaggcggcgacaatcccggcggccaccgccaacaggtggaaggggagtctgccgccatggaaccacagccagcgcgcgccttcaattgataacgcgctgacgctgaggatcacgatattcagcgaggcggagaccgtgcctttcggcaggtcgttggaaaagagggtaaagcgaaacagcgtcgggaaaatcagcccgatgccgaaggcgtagaagcaggtgccgagcaccgaccacagccagacgtggggccataccagattgccaacgatcaggatggccaggccgagcatctgtaccggcaccgcgctgaggacaaagcgcgggcgggtagggtcttttacccagcgcgccaccgacaggttggcgatgataacggcgctgaagaccggcacctggctccaggcgaactcgctggtggtcagtccgccggcgtccattaaaatcactggcgataccgccacccagctcatcagcggaatatagctcagcgacagcgtggcggcgccgagtaaaaagatgcggttgcgaaagacgttgcgaaaatcgcgcagcacgcccagggggctgaacggcacatcgccgcggcgcaccgtctccggcatggtcaacagcaggccgagccaggccaccaatcccatggcggcgataatgccgaacagcgctttccagtgaatgaaatgcatcagcgccgcgccggagagcgggccgacgatcggcgccaccagcacgacggaggtgatcaccgccatcagtctgatcgatcttttttcctcaaaggcctcctgtacggtgacgtagccgacggtggcgataaagcagatgctggtgccctgcacgaagcgggcaatcaggaactgcgtcatggaggtggtgaacagggtcgccaggcatgcgagggtgaaaatcagcgcgccggtgagcagcaccggacgccgtcctatccggtcagagagcggccccagcagccactgtagcgccatgccgccggccatatacagactcaccgaggccggagccagcgccacatcagcattgaaatcccgcaccacgtgcaggatccccggctggatcagatcggtagtgagataagcggaaaaatcatacagaattaacgccgccgggaagaacagcgcggcggcgtgtcggctcagccagtgggaaatcctgtgcatcatttcgccctccctgtggaatatttatcagcgctattgttcggatagtatcattgctaaccaatatgcagatgcagcagcgaggggatctgcgagagcagccacaacaacaggccgatggttccccccaccagggtaccgttgatgcggatgaactgcagatctttaccgatattgagctcgatctgccgcgacatatcgcgggcgtcccagctcttcactgtgtcgctgatatggcgggtgaggaaggcggcgaactccggcgccacccggtgcgccgcctgctccaggtgttcgttaagcgattcgcgcagcgcgtcgtcgcggagtaaggtttcaccgaaccactgccccgcctcggcgatgcgctgcttaatacgtgagtcgtcgctgctgatatcgttttttacccagccgcgcaggtcgccccatacttcgccaagatagtggttaaaggtctcatcattttttagccaggctttgatgttatcggccttctgcgccatatccgggtcggatttcaggttatcgataagcttttgcacggcgcggtcaaaagtctgacggatctgatgcgtacggtcgtgagtcacctcgtccagcagggtattcaccgcgtcggtgaccatctcagcgctgtgctcgccgagccactcggtgggtaggagtttggccttcagcgggtgttcggtctccagccagtgtacgatgccgcgggcgataaaggcgcgggagctgtcgcgctgcagcagggcgatcagttggttcatcagcgaatcgagcagcttttgatggcgattgtcgcgggtcagtccctccagcatcatggcgctggtctgcgtcaggtcgaccttatcgatagccttatgcaccgcgcgtcgcagcagacgttgaatgcgcgcgtcatcggtcagttcgagaaaaccgctcatcacctgcagcaggtgctggccgacccgtcgggcgttctccggctggctgaaccagttgccgagcatcagggctggctgatagcggcggatcagcgcgaccagcgacggggtatcaaggaacttttcctcgacaaagcggccgaggttgtcggcgatgcggtctttattgcgcggaataatcgccgtatggcgggcgacaaagggcagcggaatacggcgaaacagagccacgaccgcaaaccagtcggccagcgccccgaccatcgccgcttcggaaatagcttttagcgcaccgacccagggcgacggtggtagcgcgagggtagtgataaaaatggcggctgcaatcagcagcagcgacagcgccagcagtttggcgcgtttcagttcagcgagtttttccatatgcttaagcatatagcctgacggcgaggtcgtgcaaaaatcgccagataatccccaggccgaagagcatcaggatcgcccccgccgcccgctcgactcgccagacgatggcgcccaggcggcgctgtatctgcggcagcgcaatcgcgctcaccagcagtaaatcccagaagaacaccacgctgaccatccacagcccgctcaccgtttgctgaagcagggtcacagccggcccgagcagggaagtcatcagcgccagataaaacagggcgtttttggggttgagcagcgatgaccccagccccagcagcagctgcctgccgaaccccggacgcgctgcgcgaacgctctccatcgccagcgtcgcgggacggctgcgtatcagcaggctgccaatccacaataaatagcccgcccccagcagctcgatgagcaaaaaaagcagcggcgcctggcgcagaagcccccagccgacgatggcgagcacaatatacagcgcattgcctgcggcgatgccgagacacaatccgatgctgccgcggatccggtagcgcacggcgtagccgatcagcagaaaaaaatcagggcccggactgagcagagcgacaaagtgggacagggctagcgccgggaagacggcgggaaagagcgtcgataaggtatgcatagtggcctcgataatggtgcagaggccaccctacgccaggtggcgtattacttattgtcagatattgatctgctttgcgcatactgccgcggcgtggcggcggtatagctgacaaaggttttatggaaatggctctgatcggcaaagccagcctgatagccaacgtcggcgataggatccccggcgcgtaagcgcgttttcgcatattcgatgcgcgccatgttgatcaaactggcaggcgtcaggccggtatcttgtttcacggcgcggataacggtctctttacgaagcgcgctgtcgtgggccagcttatccagcgacggcgacgccggcagatccatcgccaggcgctgaaacagcagggcgctggcgtgatgtggcgcctgcggcgcggcggcgcacagcggcagcgcgtgcaggagttgcgccagccgggcgggcagttgttcaaggctcccgcggctcatcagggcgacaacctgctggaaactggcaaagagagggctgtcgcgcagcagcggctgcggcgaggtgatactggcgccagggggaatatccgggcgctgcgcgtggcaccatgtcgcgtccaggtaaagcatgtgatagctgcgcggcctgccatgcagcggattacagctatgcggcgcgtgcggcgggatcacgatcagatccccgggctgtagcaggtactcctggccagcgcacaggcagcgcgtttccccctcgataatcgcccctacggaaagctgggggtggctgtggcgcttataggcccggcggctgcgccgggtgctgcgcagctccagccacggcagacgatcgtctcgccagaaggtttgggggatatctcgggtatggttcactgctttggcctttgctgcggggataagccgtttatagcatgctgcgccgaggctgtcgcccgcctggatttgcgtaccgcgtcgaaaaaggatgtcacgcttgcagtccggggaaatatgttttcgtagcggaatgtaaaatcccggtttccggggtgccagagacattcatgggatgtagagtccctgcaggataagcaggcagggatgagccgatggcaaagggcaccacctcgacgccgcatgatgcggtgtttaaacagttcctcactcaggccgacaccgcgcgcgattttctggcgatccatctaccgcctgcgctgcgtcagcgctgcgacctcgataccttacagctggagtcggcaagctttatcgaggagagcctgcgggcctggtactccgatgtgctgtggtcactcaaaaccgcgtctggcgagggctacatttatgtggttatcgaacatcagagctcgccggatgcgcagatggccttccgcctgatgcgctacgccatcgccgcgatgcagcgccatcttgatggcggtcatacaaaactgccgctggtggtgccgatgctgttctatcacggagcgaccacgccatacccgtggtcactcaactggctggactgttttgccgatccacagctggcgagtgagctttatatctcgccctttccgctggtggatgtcacggtgatccccgacgatgagatcgttcgccaccggcgcgtggcattactcgagctgatacagaagcatattcgccagcgcgatttaatgggcattgttgagcaactgacgacgattttacttagcggggacgctaatgacagacagctaaaaacgctgtttaattatctgctgcagactggcaacgcgcgccgctttggccggtttatccacgaagtggcgcaacgggttcctcagcacagggagagattgatgactattgctgaaagattacaggaagtgggccgcagaaaaggcaaacgggaaggccggcttgaaggcagacaagaaggcagacaagaaggacagcatgccgaggcgctgcgcattgcccagaggatgctggctgacggcattgcccgcgagacggtggtgaaaatcaccggcctgaccgccgacgagatcgccgcgctggcgcattgataacgccggggcggcctgacggtcgccccggttagcctcgttatggaatattccggatatacctaactttacccgcatcgccagccatctcgactacccttaatatctttaacggcatttttgactgccttagtagcgataacaaggagacatgcgatatggcctatcagacggtgaatcctgcgaacaatcagcttattaaaacgtacccggcgcacagcgatgcggatgtggaggcggcgctgcagcaggcggatgcgctctaccattctgcctgggcaaaaggcgatattgaaccgcggctggcggtactgcataagctggcggatctgatcgatagccgggcggaggagctggcaaaaatcgctagccaggagatggggaaactcattaagcagagccgcggcgaagtgaaactttgcgcgcagatcgcccgctattacgccgataacgccaaatcgttcctggcgccggtgaagtatccctccgaactgggtgaagcctgggttgagcaccatcccattggcgtcttactggcggtggagccgtggaacttcccctattaccaactgatgcgcgtcctggcgccaaacctggcggccggtaacccggttatcgccaaacacgccagcattgtgccgcactgcgcggagacctttgcccatctggtgcgtgaggccggcgctccggagggggcgtggaccaacctgtttatctaccaggatcaggtggcgaagattatcgctgacgatcgcgtgcagggcgcggcgctaacggggtcggagaaagccggcagcgtggtggcggcgcaggcggcgaagcatattaagaaatcaacgctggaactgggcggcaatgatgtgtttgtcgtgctggacgatgccgacctggagcgcgcggtgaaaatcggcgtccaggcgcggctgaacaacgccggccaggtgtgtaccgctgccaagcgctttatcctgcacgaaaatatcgcggatgcgttcctgacaaaatttagcgaggcgtttcgccaggtgaaaatcggcgatccgctggatgaaagcaccacgctggggccgctctcttccaaagatgcgctggataccctaagcaaacaggtggacgaggcggtgaaaaatggcgctaagctgcatctgggcggcaaagcggtggctcgagaaggcaatttctttgaacccaccattttgaccggtatcacccgtgataatccggcgtacttcgaagagttctttggcccggtggcgcagatctacgtggtgaaaaacgatgaggaggcaatccagctggccaatgattcccactatggtctgggcggcgcggtgttcagtcaggatatcgaacgcgccaaacggatggcctccgccattgaaaccggaatggtttatatcaactggctcaccgataccgcgccggagctgccgtttggcggcgtgaagcgttccggttacggacgggagctctccgatctcggcatcaaagagtttgtgaaccagaagctggtggtggtgcgccgctaagcctatgacccggccataaaaaaacctgccattcggcaggtttttttatggctaatgctcagcgcaccttaactttatcgcggggcgttgaccataatcagaaggtgaccccgccgcccacataggcgccatcaatcagggtgtggttcgggcgaccctctttaccgtcaacgctcacatggcggtaacccactttcaacgtcactggaccaatcggagaccagctcacgccgccgttcgcttcaacatagtttttcacgctgttgttcagaccatccggcgcgacatacccttcgccaaacacgtggatgctgtcggtcagggccacgttcactccgccgccgaccggaaacgcgacgccgttatcgccttttttcggcccgaggtagatggctttcgcgccggcgttgagcatcaccgggcccacttccaggttgtaacccgcgcccacgccgccggtctggctaccatcatcggtattcttcagccagtggctttcggcgtacaggccagaagaggatttacccatttccatattcagattagtgaagtttttaccctgttcaacggtaaaccccaccgccatggcggaaccagagaccgcggtcagggctgcaagaataaggatgttaagctttctcatggtttactcctcgtcaataaagttgtctgagggcaccttaacaagcgatgtttacctctgcaaatgtgacttgcgtcgattttttatgctagttttgtcaggaaggtgttttgaaaatgttgtaatgacgttgggttacggcgaggtcaatcagcaaatttagcctgtttagccgtggtttaattggtgggctaaacagaaactgaacagagcagtcattaattattaaggggcctattcattcagtttcttataatttccaaaaatgtttctactgttacttattaaaacgttgctttacatttttcgacgcgctgccgacgtttggtccctgtttttgacgaggtctcagagagaagggggcctgcgccttagggcgcaggcgggcaggttagcgtcgtaacccggcaaacgccgcgcgaatttcctcttccggcaactgaatgccgataaacaccagcgtgctgtgcggcgtttcatcgccccacgggcgatcccagtcggcgctgtagaggcgctgcacgccctggaacagcaggcgatttggctcgccgtcgatccacagcatgcctttataacgcatcaattgctcggcgaaggagagcagcagattttccattacccgtgaaacttcactgatatccaccggatagtcgagctcgaccacaatcgacgagacgtcattctgtttttctgccacaaaatgaaagcgcggtgtggcgctgacaaccttctcttccagcataaaaccgctggtgttaaacaactggcttaaatcgatatcgccgtgaatgacggtataaatcggcgcccgcgcgttaatgcgcgccagccgttcacgcagcttttcggtgtcgccggcgacgtcggttttggttaacaggatccggtccgcgtagccgacctgcgactgggcgatggtgaactgatccatctgctggtcggcatggacggcgtccaccagggcgatcacgccgtccagcagatagcgctcgcagagcacctgatgggagaaaaaggtctggataatcggccccgggtcggccatgccggtgcattcaatcaccagccggtcaaactcgatttcgccgcgatcgcgactgtcgaggagatcgagcagggcgtcttccagttcgttggagcgtgtacagcagatacagccgttggtcagggttttaatctgcgtggcgcggtcgccgatgagctgatcgtcaacggagacttcgccgaattcgttttcaattacggcgattttgaaaccgtgctgctcattgaggatatggcgcaggagggtggtttttcctgcgccgagaaaaccggtgagtagggtgactgcaatcggtgccattattgcctccattaacagcagcgtacgccgcctttgccgtcgccgccgtagcgggcctgctggcgttcgcggaagaattcttcataagtcatgtacggctgatccggatggttggtttgcatatgcgtgacgtagttgtcgtaatccggaatgccaatcagcatttttgccgcctgaccgagatatttttttgcctgacctaagttaccaaacattataagttccagataacgaataaagccggatggcggctagcgccatatccggcctacgttaatgcgcttttggtaggccggatacgcgtagcgctatccggcatcagggttaatgatgtgacgaggtcttcacgccgccttccggtaccggcacatacggagtctctttgtcggtacgcaccttattgttgcggacattgagccaggttttgatgccgtagaagatgatgctatacaccaccaccaggaacagaatactcaggccggcgttggtgtagttgttgaccacgatatggttcatgttggcgatctgctgcgcggtcagctcgccgccggcggcaatcttctctttatactgctgagccataaagaagaagccttccatctgcgggttgctgctgaacagcttcaggcccagcgcccaggtggtgcacagcagcagccatgccgccgggataacggtgacccagatatatttggtgcgctgcatcttgaccagcaccacggtgccaagcaccagcgccacggcggccagcatctggttagagatcccgaacagcggccacaggctcttcacgccgcccagcgggtcgaccacgccctgatacagcaggtagccccacagcccgacgcagccggcggtaccgataatcccggcgaccagcgagtcggtttttttcaggaacggcacgaagttacccaacagatcctgcagcataaagcggcctgcgcgggtacccgcatccagcgcggtgaggataaacagcgcttcaaacaggataccgaagtggtaccagaagcccatatccgccatcgggatgattttatggaatacgtgggcgataccgacggccagcgtcggcgcgccgccagcgcggttcagtaccgaaggttcgccgatatctttcgccgtctgcaggatctgctcaggtgaaatcacaaagccccaggagctgacggtcgccgccgcgtggacggtgacttctttcaactgcgctgcgatcatcgccgcgttttcaccgcccatttcatgcaggttcggcatgacgatgcccaggcccgccggcggggtgttcatcgcgaaataaaggcccggttcgataatcgaggccgcaaccagcgccatgactgcaacaaaggattccatcagcatcgcgccgtagccgataaagcgggcatcggtttcgttggccagcagcttcggcgtggtgccggaggcgatcagcgcgtggaagccggagaccgcgccgcaggcgatggtgataaacaggaacgggaacagcgcgcctttccacagcggaccggtaccatcaatgtactgggtcaccgccggcattttcaggtccgggttaaggataacgatccccagcgccaggccgacgatcacgccgattttcaggaaggtggccagatagtcacgcggcgccagaatcagccataccggcagcagcgcggaaataaacgcgtagccaatcagggtaaaggtgatggtggtgtctttaaaggtcagcgccgggccccagtacgggtcgtgggcaatcacgccgccgaaccagatagaggccaccagcagcacgataccgataaccgacacttcaccgacgcggcctgggcgcaggaagcgcatgtagatccccataaacagggcgataggcaccgtcgagcagacggtaaacacgccccacgggctttccgccagcgctttcaccacgatgagcgccagcaccgcgaggatgatgatcataatcaggaagcagccgaacagggcgatagagcccggaaccggccccatctcctgtttaatcatctcgcccagcgaggcgccgttacgccgcgaggagataaacagcaccatgaagtcctgtaccgcgcccgccagcaccacgccggccagcagccacagggtacccggcagataacccatttgcgcggccagtaccgggccaaccagcgggccggcgccggcgatcgcggcaaagtggtggccaaacagcacgtagcggttggttggcacatagttcaggccatcgttattaatgaccgccggcgtggagcgcgtcgggtcaagcttcatcaccttctgcgcgatgtacaggctgtaataacggtaggcgacgaggtacacggaaaccgacgcgacgacgatccacagggcgctgacgtgctcaccgcggcgcaacgcgacgactgagaggcaaaatgccccgatgattccgagaatcacccagggtatgtgcttgaatagttttttggtatccatagtaaaacctggcgttaattagatgaataattggccgaagccgtctggttttaagtaagggttgatggaggtattgattagctaggctgcctccgatcttgccagaacagcgcgcgcgtaaagttgggtaaatcggtgagtggttgtatggaaggttaagcggtcgctagctgaaataagcggttggccatcaagtgaacaagagataattatgtgattgagatcacggcatatttcaacccagtgcgatgggggagcggcagaacgtaaaaagaggtcgcgctaatgctctcagtgtgaatcgatattaattcataatctcatatacttatttcatgatgatttcatattgtcttcggcagaacttaacggtgattcatccatatcatgaaactggggtaatgaacgcgtttataattttaagtaatattttttgaagtggcttgaataatatatgttgatattaacatgggtttggttgtattaattgccacgctttgctttctattactcgagatggaacgttgtgacttaattannnnnnnnnaatggactttcattcataaagttttaattatctgtatattgcctgcctgggcatgggctgcgcctgtggataccgtacgtgagcagcagttcatcaaccagcagcagcgccagcaggcgctggaaaaccagctcgcgccgccgtcaccggatattcatttatcagtgggagaaataaataccgatgatggtttatttcccgtggaacaaccttgctttgctatttcacagattattttacagggcgccgatgccttaccgcattggcttccgctccagcgccaggcaaataaagcggttgggcgttgtctgggagggaagggcattaatctactgatggcccagttgcagaatatattaatcgatcgcggttatatcaccagccggatccttgccccgcagcaggatttaaaaagcggtgttttgcgcctggtggtgatgccgggttatatccgtgaagccaggcttacgcaggacagcgatgattatctatggctggcgagcgcgtttccggcgaccgacgggaaactactggacctgcgcgatattgagcaggggctggaaaacttgcagcgtctgccgacggtacaggccagcatggaaattgttccgggcgaaacgcctgggcaaagcgatattgtcattaaccgccaacaggaacgcttctggcgcgttgacgcctcgctcgatgattccggctctaatgccaccggccgctatcagggtaacctgacgttgtccctggataacccgttagccttaagcgatcttttttacctttccggctcacataacctcgatggcaacggcggtaaatcctcaaagaacctgaccggtcactattcggtcccgctgggttactggcagttcggattaaccgccagccagtacgattacgtgcaaaccgtggcgggggccaacggcgattaccagtacagcggtaaaagcaagaacgttgatttccagatgagccgcgtactgcaccgtagcggtagtcagaagaccacgcttagcgccgatgtgttagcccgcgagcagcgcaacttcattaacgacaccgagattgccgttcagcggcggcaaacggcggcctggaagcttggtctgcagcatcgccattacctgggcaacgccactctcgatgccggagtgagctatcagcgcggtacccgctggtttggcgctcagcccgcgccggaagagcaatggggggaagcaaccgccctcagcaaaatcctgcaattcaatgctcagctcaatttgccttttgccctgggcggccaaaattttcgctttaccagccgctatcagcggcagatgagcagcacgacgctgacttcgccggatatgttttccatcggcaatcgctggacggtacgcggcttcgacggcgagcgcaccctgaccgccagtcacggctggtacgtacgtaacgatatcgcctggtcgactccgttgccggggcaggagttttatctgggggcggattacggcgaagtcggcggcgcaggcagtgaaacgctggtgggcaaacacctcgccgggggcgtggcagggctgcgcggccagtaccaccgcgccagctacgacctgttcgccggtatccctttagccaaacccgatggctttaaaaccgatccggcaacttttggtttcagcgtcagctggagctactgactttcactcacgcgccgcccggcggcgcgtgctgcgcacatggacgatcttccgcgccgcggtggacaacggatgacgagtaacggcaatgaataaacgcttttatcgaatcgtatttaataaggctcgcgggatgctgatggtggtggcggaaacgacccgctctcatcgggctggcgtatcgccgcaatccggcgccgacgcgcgaaccgggtcgacgttaatctcctccctggcgccgctggcctttagctttctgctcgctttttcctgtcttacctcggctcaggcggcgattgtcgccgataaccatgcgccaggcggccagcaaccgcagatcgccaagagcgccaatggcacgccgcaggtcaatattcagacaccgagcggcgcaggcgtttcacgcaacgtttacagccagtttgacgtcgatgggcgcggcgtggtgctgaataacagccgtgctaacacttcaacccaactggccgggatggtcgccgggaacccgaatctggcgaaaggggaagccagagtgatcctcaacgaggtgaatacccgcgatccgagccggctgaatggctatatcgaggttgccggacaaaaagcgcaggtggttatcgctaaccctgccggaattagctgcgacggctgcgggttcatcaatgccaaccgcgcgacgctgacgacaggccaggtacagtacggtaacgggcagattagcggttatgatgtcaatcgcggcgaaattctcgtacagggcggcggccttgatgcgagctcggtagacagcaccgacctgctcgcccgcgcggtgaaaatcaacgccggggtttgggcgcaggagctaaaggtcaccgcagggcgtaatcagatcgatgcggcgcacagccggacgacggcaaaatcagccgacggcagtgcgctgcctgcggtggcgatcgacgtcagcgcgctgggcgggatgtacgcccataaaattcgtcttgtcggtaccgagcgcggcgtaggcgttcacaatgccggcaatatcggcgcggcggcgggggacgtagcaatcagcgctgatggcgcgctcagcaaccgcggcgtgattcagtccgcgcagaatctgcaactgtccgttaagggcgatcttcacaaccagggccagctgtacgccggaaaagatagcgtggtgacggccagcgcgacgctaaccaatgacggcatgattgccgcgcaaggcgatacgcggattgccgccaacgctttgcgtagcgcgcaaaacagtacgctcgccgccggattaaatagcgatggttctaccgccagcagcggcgcgctgacgctgaatagccagagctcgctggcgctgaatggccgcaatatggcggcaggaatgctgacggcgcagggcaggacggtggatcttgataacagtcgaacctcgggggcgcggatcgtggtcagcgccgcgtccggcgatatcaccacccgagatgcggtggtggcggccagcgaaaaactccagttggccgccagcggcaaactcaacaaccacagtggcctgttgacggccagcaagcttgagctgaaagcaatggcgctggataaccaacagggcgtaatccagcagacgggcgaggacgatctacgccttgattttcgtgcgggattggataaccgcggcggtgagattgccagcaacagccatgctttgacgctcagcaccagccagttgctcaatcaaaacggaacgctgctgcataccggcagcggcggcatgtctattaccagcgaaggcgcgctggacaacggcgaaggcactattgccgctaacggcaatatcgttttgcactccgataacattaataatcgcagcggtaaaatcagcacgacgcagggcaatgctcagctcactacgcgtcacgagctggaaaattcgcaagggaatatcgttgctggcggcagcctttctctacaagtggccagccttcggaaccagcaggggcaattgattgcggcgcagggcgacctggccatgagcgctgaagaagggctggataaccgcgaaggcgtgcttaccgcaaatggcaatatcaagcttgacgccgacaatctgaccaaccatggcggaaaaatcagcgcggcgcagggcgacgttcagctcactgcgcgccatggggtgaataactcgcaggggaatatcatcgccagcggcgacatccggctacaggctgaaaatcttaataatcgtcacgggcaggtaggcacggcgcagcggggcagcgtcaacctgacgacgagcggtttgctggataatcagcagggcacaattaccgcctttgatgccctgggtattcagagcgccaccgttgataaccggcagggagaactgcagtccggcggtaatctcaatatcaccatccacaaccggaggctggataaccgacaggggcagatcgtctccgccgccgctctggaaatagcaggcgtcaacctggcgctggctaatacgggcgggacgttacttgccgcgagcaaacttagcctcgatgccgattccctcagcggcgatggcgaggtgctctctcagagcgatatgtcgctcacgttgcgtcaggcgtttcataacgccgggaggatcatcgccaacggcaacctgcagtggaatctctccggactggggctgattaatcagggggttatcagcgccggccgggcgctcaatctctatgcggcaaagctggataaccgtcaggaaggcgaaatcagcgctggcgagaaccatttgacggtcaacggcgagctggtcaatcgggggctgattgacggtggcttaacccatattgtcgccacgacgttaaccaatatcggcagcgggcgcctgtacggcgacgccgtcgcgctgcaggcggcaacgctgactaacgccgcggagaacggcgtggcggcgacgattgccgcacgggcatcgctggcaatgggcgtcggcacgctcaataaccaggatcacgcgctgatctacagcgacggtacgctcgccattggcggccagcttgccgaagacggttcgctcagcggccgggcgggagtgtttaataaccacagcgcaacgcttgagtccgccggtgatatggcgctcgatatccaacaaatcaataactacaacgaccatctagtgacgaaagatgtgatggtcgagcagtcatggcgccatgaggcggcgctgaaaggatcggtacagcgcttcgactggtcgctggtcgataccagctataaaaacaaatacggcgttcacgacgccatcatgccggacggaagccgcggcgatgagttctatgaataccagtaccagcgtaccgttgtggaaacgcaggtggtggaaagcgatcctggcaaaatcctctccggcgcccggctcatcatcaacagcgataagctgaataactacgatagccagattatcgccgaaggagcgctcggtggcgtgattggcgaactaaacaacgtcgccacgaccggcaaacgggtgaccaccgacgtcggcacccagacccgttggtatgagaaaaagaccagccgcccgtttggcggcaccaaaaccagccaggggaaaaaaagcagcgaatatgaaccgacgccgacggttcagaccatcgatttgcaaaccatgaagtggcagggcaatacccaaattgatggccatagcggcgtgattaatccgcgcgatcgcgccgatgaaacaggcgaactacccgccggacggctggtggaagtgacgccggttaacgctgacggaacggttattcgcgtcgtcacaccggatacccggcttcctgtcagcagcctgtatcagatcgacccgcaggctaaagcaggctatctggtggaaaccgatccgcgttttaccaacggtaaagcgtggctcgccagcgactacatgcaaaatcagctgggcgttgatcaggcgatgaagcggcttggcgacggctattacgaacagcggctggtgcgtgagcagatcgttaagctgagcggcgggcgctacctgcagggctacagtaacgatgaagagcagtatcgggcgctgatggacgcgggcgtcgccttcgccaaacagtacaacctgacggtcggggtggcgctgacgccagcgcagatggcgctgctgaccagcgatatggtctggctggtcgccagagaggtcacgctaacggatggctccgtgcagcaggtgctggtgccgcaggtttatgcgcgggttaaagcgggcgatctcgatggcagcggcgcgttgctcggcggtgaaaacgtggcgttcagcgtgagccgtgatgtgaccaacagcgggcacatccacagccgcggcgtgacccagctaaccgcggaaaacattcataacagcggctatatcggcggcaaccagctcacgctaaacgcgcgtactgatatcaacaatattggcggaacgctgcagggcggcgatagcctgatcgcgcaagccgggcgtgatatcaacagcgccagcaccctcggcggcggcccgggtaacatcagcctcgatcggccggcggggatttatgtccagaatgaaaacggccagttggggctgcaggcgttacataacattaatctgacggcaagcatggtgagtaacagcgcggcgggcagccagacgcagattatcgccggcaacgatctcaacctgcagacgctcgccaccacccatagcgaaagcggaaactgggggaaaggcaacgatcgttccttgactcagcgtagtgatatcggcatgcaaattaacggcggcgcggtggcactgtccgccggccacgatatgattgcccgcgccgccagcgtgacggcgaccagcagcctgacggttgccgccggcaatgatattaacctcagcagcggcgagtcctcatggcacctgacggaaaatagccatcaaagcagcagcggcctgctggctcgccgctcgctcaccactcacgatgaagtgtgggcgcagaacgccatcggcagcaattttagcggtgaccgtattgtgatgcaggccgggcgcgacctgctggtatccggcagcagtgttgccggcacccaggacgtcaaccttgtggcggggcgtaacctgaccattaccaccgccgaggagagtcgccaggaaaaccatctacgtaaagagaaacatagcggcttttccggcaccggcggtgtcggcttcagcgtcggcagttcgtcgctgaaagccaacgatgtgacgacggcgctgagtagcgccgccagtaccgtcggaagctcacagggcaaccttagcctgagcgccggtaatgtattgacggttcagggatctgacctggtggccggcaacaatatggcgttgaccggtaaaaccgtgaatattctggcagcggaaaaccagagcacccagacccataccgtggagcagaaaaccagcggcctgacgctggcgttatccgggatggtgggcagcgccattaataccgcggtttccagcgccaaccaggccagcaccgagagcaatggccgtctcgccgcgctgagcgggctgcagtcggcattatcgggcgtacaggcgtatcaggcatcgcagatgcagactgcggattccagtccggagagcatgataggggtcaacctttcctggggtagacagtcctcgaaatccactcagcgacaaacgcagaacaccagccgcggcagcagcctgatggccggcaacaatctcagcattatcgccacggagacggatatcaacgttgagggcagccagctgcaggccagcggcagcgcattgctcaatgccgcgcgcgatgtgaatttattctctgcggagaacgccagcaccctgagcggtaaaaacgagagccatgggagttcgtttggcgtcggtattaacttcggtcagggcgcgaacgggctgacggtcagcgccagcgccaacgccgcgaagggccacgagaagggcaacagcctgacgcataacgaaacgaccctcagcgccggtgagcgggtgactatcgtcagcggtcgcgatacgacgctgaccggggcgcaggtgagcggtcatcaggtgacaatggacgtcgggcgtaacctgacgctgaccagcgagcaggacagcgataactacgattcgaagcagcgtagcggcagcgtgggggcgagcggcagcatgggcggcggttcggggtctcttaacctgagccagagcaaaatgcacagcacctgggcgtcggtggaggcgcagacggggatttttgccggtgagggtggttttgatgtgaaggtgggcgggcatacgcagctgaatggcagcgtgctggcgagcacggaggcggcggagctgaaccggctggataccgggacgctgggtttccgggatattaaaaactatgccgagtacagcgtggagcagcagagcgcgggagtgagcacgagcggtagcgtggcagggcagttcctcgggaatgcggccagcggtctgctgatgggggcgaacgggagcggcagcgacagttcgctgacgcgggcggcggtgagcgagggcagtatcgttatccgcgacggcgcgaatcagcagcaggacgtgacggggttaagccgggatgcggcgcatgcgaaccagacgctgagtccgatatttgataaggagaaagagcagaaccggctggcgacagcgcagaagacaggtgaaatcgggcgccaggtgagtgatgtgctggtgacgcagggcaagctgaacgcgcaggcggcgcagagcgacccggcggcgcgggcgaagctggtagcgggagggaatggcagcccgagcgaggagcaaatcagcgcgcaggtgagccggacggcgacggcggactacgatacgggcggaaagtaccagaaggtggcgcaggcggtaacggcggcgatgcagggtctggcgggcggcaacctggcgcaggcggcgagcggggcagtgagtccgtatgtggcggaaatcattcacagccagacgacggacagcgcgacgggtaaggtgaatgtggaagccaatgcgatggcgcacgcggtgtggggagcgatagcggcggcatcgggaaataacagcgcgctggcgggagcggcaggcgcagtgagtggcgagctgctggggcgctggatagcggcggaatattatccgggtgttaagacagaagagctgtcggaagagcagaagtcgacgataagcgcgctgagtacgctggcggcgggactgatgggggtgcttagcggaggcagcagcgcggatgcggtggcgggtgcgcaggccgggaagaacgcggtggagaataatttactgagtggaagtgaagatgctcaggccatatggatacgtcagcatggtgtcgatatggcgagttgttctgataatcctggcgggagcgcatgtcagaaagcgataaatgagcgggatgctgttggacttgcgctagctacaggtagtgttaccttgttaccgggtggcgttcaggctatgtggggtcttggagccggtgcgaatgcaggcatcagttatctggcggatggcacgatagatccggcaaatgcggctatagcaggttgggtgaacgttatcagcatgggtaacggtctcgcaggtaccgttggctggaatgctgcgggtggtgcattaggaaactggatagacaataaagatccgctaactggggcaataacaaatggtattggtgctggcattggttacggtataggcaaaggaatttcttggggtacaaatgcaggggtaaactggtggaaagacggttgggatccgaagtttaatcctgttctgcaaaagtatactgagattaaaggtgactttggtatcttaaaagaagttacaccgagtaacattccaggcagttttggcgacataggagcatctttctcttcagaatatgggggaaaaaactcgaaccaatcattgaggagaaattgaaatgaaatccttccatgagaaaatactaaacctgctgattctatttatcgcctgtattcttgggattattgttagtttcctatgtataactttgtctatagacgttttagtttggatgctaacaggaactttcgatttgacaaaagccgatatactcaaaaccattaaaattggttgtgtgattggaaccttcactggtgcggtttttgttattgccagactatttaaactaaaaggattttagagcaaagataggataaaaattcatccacagagttgggattagtgtggagaataatgctttcggagcgagcgctggaacaaacctcgggttctggttcagccagacgccagactgcgatacagactataaaggaaaacttgctgaagatgtggcagaagggaatgcagtagtatcagcccatcaggcagatactgttgggttaggcatattgcctaagggggctttggtaacagctgccatcggtgggggaaaggagttgaactccttattgaaaagttaagtgatactaatgaatgatttttttaagcgtatacttgtagcttttttgattttttttattgtttccttaagtgtggttgtcgtttgtgtggactttaaattatttatatcatttttgctttggctcgttggtggtgaatattttatctgctggagtgatatatggagagctgtgaaggttagcttttgtggtggagctgtaggtggtgtaggattttctttgtttcatttttttagagttaaagggttttaatatatgttatgaatatgagggggcaattaactcatgtttaaaagattgtctacttattaccaattagtagcgctatttatagccaagaggattggaagtcagcggggctaatctatctgccgggaggaatgcagattactggcgcgataggcggaacggcaaatgctggtattcagtatcttattaatggagaagttaatccaacggatgtgctcattgcgacgtatgttggagcttttaccagaaatacaggattaaagggaacaatgagctggaatgcggcaggtggtgcaacatccagctattgaaaggggataatccttttacaggcggcttaattaatggtttggcctctgggatgagctatggtgcaggtaaactagttgaattgccgtttgataaagtccttaatccaatgaagccatggaaagactggatctggacagatgtcgggatgggaatatccaaaccgctgccgattaatccagtacctggtattgctggtaatgccttgggtagtgcggtgacagagatcctcaatgatcaagcgggtaaaacaggtgtgaaattccaaaaagggaaacaaaaatgaatagaaaatcgtggttctttatttttttctatctattttttgcttgcaatgtagcaatgatcgtattgtttttaattatatacgtgctcattagaggttacctcttattgatttaccacatcccatttgagctgatttggagtgatacatggaagtatacaaaagctgcatgtttcacaggggcgttgatagctactggttgttggtggatttattaccagggctacaagaaaaatcgtaataggtagcgggagggaatggcagcccgagcgaggagcaaatcagcgcgcaggtgagccggacggcgacgacggactacgacacgggcggaaagtaccagaaggtggcgcagtgctgacacagtttgcccagcaggaaggctaacgcgaatctgtgtagcccctccccgttatccggggagaggcaggcgaggccattacaccgcgacttccatttccatcatcaccgggtggaaacggcgtttaaagtaaatcaggccgtgcccttgcgggctcagggaaatattgcggatctccaccagatacaccaggtgggtaccgatggtttgcacctggctaatttcgccttcgaggctggccagcgagcccttcagcaccggctgcccgagcgcgccctgctgccagccgctgagggcgaaccgctcttccatcgtcaccccggtcatcccggcgaaatgacgggccatgatttcctgttcgtggttcagcacgttgatgcacaacttgccgttgccctgaaacaccgggttcatcgcgctgttggcgttgatacaaaccatcaccgatggcggcgtatccgtcaccgagcataccgccgtggcggtaatgccgcagcggccggctttgcctgcggtggtgacaacgttaaccgccgccgacaggctggccatggcatcgcgaaaacgcaggcgttgttcatctaattgcattatgacctcccgctgtgaattacttcagcagcttatccaacatgttgatatcagcattattgtgcagatgcggcaccgtccagccgttctggtcgtactcggacaggcagcggtcgaccatcgccatcattttgtccatattgccggagctctgcgcctggcgcagacactgcaggcgaatttcatcctggctaccggagtagttgatctcatacagttcatggcggccgccgaattcgctgccgatggcgtcccacatcagtttgaggattttgatacgttcaacgtggtccataccgttggagccgcgcacgtacttcgccagatactgatcgatctgcgggttgttcagatcgcgggcgctggacggcagataaatcaggccgctggtgacgttgcgctcgatgatgttcttgatcttggcgtaggccatcggcgccatcacgcgataggtctgcagcgcggcatgatccggcagccatgcgccgttgacccacggcgtcgcttccgagcacatggaatcgctcagcgcccagaacatgttgcgccacgccaccacttcgccaaggtcggcctgcacgccacggaattcgagggtgccggtacattccagagaacgcttcagcagggcagtgataaagtccagtttgaccgccagacgcacgcaggcctgcagggggtacatgcgggcaaaaccgccttccatggtccagcgacggcagcggtcaaagtcgcgataaattagtacgttctcccatgggatcagcaccttatccattaccagaatcgcgtcgttctcgtcgaaacggctggaaagcggatagtcgtacggcgatccggtcgcgccggcgaccatctcataggaggcgcgggagataagcttgacgccttcggcatccatcggcgcgacgaacatcagcgcgaagtccgggttctcgcccatcacctgtgcggagccgaagccgatcatgttgtagtgggtcagcgccgagttggtggcgaccactttcgcgccgctgacgatgatcccggcatcggtctctttttccagcttgatgtagacatccttcacttcatcagccggcttgtggcggtcgatcggcgggttgacgatcgcgtggttaaagtacaggccggtttcctgaatgcgggtgtaccagttgcgggcgttctgctcgaactggccataaaacgccgggttggcgcccagcgcgcagccgaaggcggctttgtagtctggggtgcggcccatccagccgtagcttaagcgcgaccattcggcgatggcgtcgcgctgctggcgcagatcgtcggcgcttttcgccacgcggaagaatttatgggtgtagccgccgctgccggtatcggtgccccagcacagggaatcctgcatctccggtttgtgcagcgcatcgtacagctgagcgacggaggccgcggcattacggaaggccggatgcgtggtgacgtctttcacgcgctcgccgtagatataaatttcgcggccatcctgcaggctttttaaatactcttcaccggttaacgggcgtttcgcgtcggcgcggaaatcttcaggtttcataggggcctcttcagtatttatcggaataattatgttaaatatatgttttgtttttgttgtttaattgaagcggttatggcgcttgtcgtgaagggacgtttgcgacaacggcgggtacttttcaggcgggagtgaattttgtgatctctgcaacttttaccggctggcgcggcgctggcccgccctacggtctgtagcccaggcaagcgcagcgccgccggggtattacgacaccggtactttttgcgcccggtagctgctgggcgagcagccgacctggcggctaaaaaagcgcgcaaaataggcggggtctttaaaccccagctgccaggcaatctcattgaccgcgctatcggaaaacagcagcaggcgcttcgcctcgcgcagctggcggtcgaatatcagccgcttcggcgaacggttggcgaagcggcggcagatgtcggtcaaccgcgattcggtcagatgcagctccctggcgtaatccggtaccgtccagtgctgatggtagtggctgtcgatcatctggttaaagcgctggaatagcttcagctcgccgcgcatcccgctggcggcgtgatcgtcgagctttgcgttacgcagcagcagggtaaagaccgcctgcgccagtagcgccagggtatgctcccgccccggcaactgggcggtagattcccggcgaatcagctgccagtagtgggccagcgccgccagctcgtcgggtttatccgccagcgacaggcagatccccggcaggccgaaggtctcccgcgtgccgggataaagtacctccagcagcggccagatcagctcctcatggaccgtcaacacatggccatcgctatcggactcggtaataaaagcgtgcggtaccgagggcggcgttatcacaaacagcggcgcctgcaccgaatagcgatggtcatcaagctgcagctcaatctgtccggtatcaaggtagtgcatctggaaatagcggtcgtggcgatgcgcctgcatgtcgcggccaaaaaaggccgccatgcgggagaacgactggtagtgcacctcttcggtacccagactctcgtcgtaatctttattgatgtcgatgttggcgatggaatgctggcacatacccgctccttagtggcctttttgcgccgctaagcccggcgcggcggcggcgtcctcacgctggctcattggaatgcgggtaagcaccagcgcgccgacgatcagtaatccggcgacaaaccacagcccggagctaaagctgccggtggtatcgcgcaaaatgccgatcaacagcgggctgacggcagagccgacgttgccgatagcgttgatcaccgccagcgccaccgcgcgcgactgcaggctgatcacccgatccggggtggtccagaaaatggccatcgcggtaaaggatcccaccgaagccataataatgccgatcagttggatcaggctgtggtgcgttgccgaagccagcagccaacctgccgcggcgaacaggtagggcaggatggtatgcatcttgcgctctttgcggcgatcggatcggcggctccaccagatcatgccgaaaatagtgcagaactgcgggatcgccgccagcaggccaatcatgatgttgctgctgccggtgttgaagctctgcaggatctgcggcgtccagatattaatggcgctgagggtattggtcaggcagaagtaggcgagggtatacatcagcaccgctggcgtcagtacttcgcgcagcgtggaacgcggcgaagccgggacgatcgccgcatgttcccgttcgcgatcgatcatcgccttcagcgcctgtttctcttcgttatccagccagttggctttatccggcgtgtcgttgaggaagaaccaggtgacgacgccgagtaccaccgacggcaggccttccagcagaaatagccattgccagcctttcaggttccacaggccgtcgagcgccagaatatagccggaaagtatcgagccgagcatcatggtcaccggcatggcgatcataaacagggcgttggcgcgggcgcgatggtaggccgggaaccaccaggtcagatagacgaggatccccggcagaaaaccagcctcggcgatgccgaccagcatgcgcaggatgtacagcgtatgcgggctggtggcgaacatggtgcaggtcgaggcgatcccccagaccaccatgatcccggcgatccagcggcgcgcgccaactttcgccagcatgatattgctggggatcccgcacagcacgtaggtgacgtagaacagcgtcgccgccaggccgaacatggtggaggtcaggccgagatctttacccatcgtcagaccggcgaagccgatattaattcgatccaaaaatgagaaaacaaagagaacaaacaggaaggtaatcaggcggcggaacagctttttgatcacccggttttctacttcaacggctttattatcattgtgttgcagggtagaggtagtcatgttgcgctccacattatccgttcaatagacggatttattgttatcggttgtggtggttgcgttgtgggtaaaccgggccgccagcgcttctgcgccgcgggccagcagggtggtatcgacgccgacggcgacgaacagcgcgcccagttcgagatagcgtttcgccagctgttcattggccatcaggatccccggcgccttgccggcctgacggatttgctggatggcatcttcaatggcggcctgcacttccgggtgctgcggattgccgccgtggcccatatcagcgctgagatccgccgggccgataaacacaccatctaccccgtcgacatcgaggatctgcggcagatttttcagcgcttcgcgagtctcaatctgtaccagcacgcacatggcgtcattggcctggtggatataatccgggacgcgattccagcgtgaggcgcgggccagcgcgctgccgacgccgcggatgccggctggcggatagcgggtggctctgaccgccagccgcgcctcttcggcattctgcaccatcggcaccagcagggtttgcgcgccgacatccagcagctgtttgatctgcaccggatcgttccacgacggacgcaccaccggctggctggggtagggcgcaatggcctgcagctgggtcagcaccgttggtacattgttgggcgcgtgttcgccgtcgatcagcagccagtcgaagcccgcgccggccagcagttcggcgctgtagctgctgcacagcccaagccacaggccgatttgcggacggcccgcttttaaggcgtctttaaaggcgttattcatggtgtttctcctagacaaaccggcagctgatggcgcccatgttgccgtagtcgacgtggaaggtatcgcccttgcgcgccgggaccgggcgggtgaaggagccgccgaggataatctgcccggcttcgagctggacatcgtacggcgccagcttgttggccagccaggccacgccgttggccggatgattgagtacgcccgcggcgacgccggtctcttcaattacgccgttgcgatacagcagggcggagatccagcgcaggtcgagctcgtccggtttaatcggccggccgccgaggatcaccccggcgttggcggcgttgtcggagatggtgtcgaacactttgcgcggacgctgggtttccgggtcgatgttgtggcagcgcgcgtcgataagctcaagcgccgggataacgtagtcggtggcgttgtagacatcaaacagcgtacagttcgggccgcgcagcggtttagccagcacaaaggccagctcgacttcgatacgcggcacgataaagcggtcggtgggaatatcgctgccgtcgtgaaagaacatatcgtcgagcagcgcgccgtagtccggctcgctgatctgcgaactggcctgcatcgctttagaggtcaggccgatcttgtggcctttgagcacgcggccttcggcgatcttcatctcgacccactcgcgctggacggcgtacgcgtcctcaatggtgatcgatggataatccagcgagatcgcgcggatctgttcacgctgtttttcggcctggtttaaccgctgggcgatcagggttcgggtctgtttatcgagcatagtgattcctgtggcattgtattgccggatggcgcttcgcttatccggcctacaaattcatggccgttgtaggcccggtaagcgcagcgccaccgggcaatttgcacattatttaaataacgcgtgcacgttgttttgtttgtagttcagcgtcgggtcgagctcttccatggcgaacgacagcgccagatagcggctctccattagcgtcgcgaagtgggatttgatcagcgcgaacagcatatctcccacgtcctgacggctctccaggctgcgcccggcgccgatcttcagggtcatatgcacgaaggcgtaatcctgcctgccgtcggccatctgccaggtatccagccagtgggcgcggctgcggatcccgccgatcggaaagatgccggtggcggccagcgcctcgttgactttggcgaacagcccaggcagatcggcctgctcgcggatgttgtcggtacattcggcgataaaatgcggcatggggcccccttacgcctgcgctggcaacgggaacacggcgttaacctggccggtaccggagctggcgaatagctcggtgataaactccaccttgccgtcgtatttatcccaacccagcaggccgagcagcatcaccgtgtcgtgcatgttgccttcgccgtagcagtagtcggcatactccggcagcatggtgcagaactctttgaatttgccctcgcgccacagcttcaccacccgctcatccatctgatgatcaaactcgcgggtgtagctgttcatcccctcttcggcgcgctggtcgtcgataaagcggtgcgacagcgaaccgctggccagcactgccacggtgccgtcgtatttctcaatggctttgaggatggcctcacccagcctgcggctgtcggcaaaatcgtgaacggtacagaaggcggaaatggacaccactttgaagtgcttatcgctgttcatgtagcgcatcggcaccagggtgccgtactccagcttcaggctgggaatattgtgcgctttggcacgcaccccgagcttcaccgcctcgtcggcaataagctggcccagctccgggttgccgtcgtagtcgtaggtcatgtcgcgaatgaaatgcggcagttcgttactggtgtagacgccctgaaaatggtcggcgcagttgatgtggtaggcgctgttgaccagccagtgggtatcaaacacgatgatggtatcgacgcccatttcacggcagcgcttgccaatttctttatgcccgtcgatcgcgccctgacggcagccgtggtttttccccggcagctcagacagatacatcgacggcacgtgagtgatttttgctgctaacgctaacttacccatatcagactccccatttcgggatcggatggtcgcccatcgagatgcagacgtttttcatttcggcgaacacttcaaagctgtactcgccgccttcgcggccggtgccggaggccttcacgccgccgaacggctgacgcaggtcgcgcacgttctgggtgttgacgaacaccatcccggcttcaataccgcgcgccagacgcagcactttgctgacgtcctgagtccagatatacgacgccaggccgtattctacatcgttcgccaggcgcagcccttccgcttcgtctttgaacggcagcaggcaggcgaccgggccaaaaatctcttcctgggcgacgcgcatacggttgtcgacatccgccagcaccgtcgggcgcaggaagttgccggctttcagatgcgccggcaggtcggacggtttatccgcgccgccagccagcagggtggccccctcttcgatgccgaggcgaatgtagccggacactttctcccagtgctgctggctaatcagcgcgccgatctgggtgttcggatcggtcggatcgcctacgcgcaggcgattggcgcgctcggcgaagcgtttaacgaactcggggtagatactctgctgaataaagatgcgcgagccggcggtgcagcgttcgccgttgatcgagaagatggtgaacagcgcggcgtcaagcgcgcgctcgatatcggcatcttcaaaaatcagcaccggcgattttccgccaagctccatggagtactttttcaggccggcgtttttcatgatgttgcggccggtggcggtgccgccggtgaaggagacggcgcgcacatcatgatggcgcaccagcgcgtcgccagcggtggcgccgtagccctgcaccacgttgagcacgccagccgggatcccggcttccagcgccagctcgcccagacgatcggcggtcagcggcgacagctcggacattttcagcaccgcggtattccccagcgccaggcacggcgccaccttccaggtggcggtcataaacggcacgttccacggcgacaccagcgcgcagacgccaaccggctgcacgagggtgtagttcagcatcttgtcgttgaccggataggtcttgccgttcatctgctggcatacttcggcgaaaaattcgaaattgtgtgaggcgcgcgggatcaacacgtttttggtctggtggatcggcaggccggtatcggcggtttccatcgccgcgatctccgggacgttctgatcgatcagatcccccaggcggcgcatcaggcgcgcgcgctctttcatcggcaggttagcccacttcgggaaggcctctttcgccgccgccaccgcctggtttatttcggcttcaccgccggaggcgacttccgccagtacctcgccggtggccgggttggtggtatgaaaatagtctgcgccggcaacgtttttaccgttgatccaatggttaatctttttcatgacagtgtctcctcatacgcttgctggctgatgatatggttgaccaggcggcccacgccctcgacttcaacgatcacctcgtcgcccggtaccacgtcggatagccctttcggcgtgccggtggcgatcatgtcgcccggttgcagggtcataaattcgcttaaataagcgatgaggaacgggatgctgaagatcagatcggcggtggtgccctgctggcgtagctcgccgttgacccaggtgcgcagggccagattatgcggatccgggatcgcctctttgctgacgatccacgggccgatcggcgtcagggtgtcgcggcttttcacccgcaggttcgggcggtagtagttttccagatagtcgcggatcgcgtagtcattgcacagggtatagccggcgacataatccatagcctcggcttcgctgacgcggcgcgcggttttcccaatcaccaccaccagttcggcttcgtagtgcatgtattcgacgttatccgggcgtaccgactgctgctggtggccagtaaaggtgttcggcgctttgataaacaccaacggctcggttggcggtttaaattccagctcgctggcgtgatcggcgtaattcagccccagcgcgaacagcgtgccgtcggcgggcggcagccagcggaattcaccttcttttaataccgtgccatcgtccaggcgcacctggtcgcgttcattgaccagcacgtcgcgtacctgtccttgccattcaatgcgtgcctgtttcatgccagctctccttctgcgacaaccgggttttcgagcgccgggaaaccgtcggcgagaatacgtacccggtcgccggggcgcagcgtgacgcgggagtggggcgtgccgataaggatcgcgtcgccgggattgagggtggcgaactcgctcaaggcgctcagcagctgcgccgcattacgctgcagatcgccggtatgccagctatccgcctcgcggccgttaatttcggtgatgatggtcagatcgtcgacgttgcgtaccgccgatagcgtgccgatggggcagaagccatcgcggcacttggctttgatcgccgggcgataaaaactctcttccggcagactcacatcgttagccagcgcgtagccagcgatatagttcgccgcctcttccgccgccactttacgcgcggttttgccgacaatcagcgccaccgttgcgccgctttgtacggtctcgccctgcggatacgggatcgcttcgccatcgccaattacggtattgcgcggcttgataaaccagaccgcggttttcggcggcgtcttgtagggggcctgttgaaacgcctcgcgccaggcgtcgagctggctgcgatgattgagcgcaacggcgaagatggtacctttcattcaccactcctctgggacagatttcggttcaaagggatttcattaatatgttaatgatcatcttttatgctttgcgctgaggtttagcaactggaagtgaatgttttgtgatcggattaacacaatatttacataacaattacttatttgttgtcaatcaataagttgaatatttttcaggaaaagactggtacttttcaggtgcagaaaccggttgtacatggcaggattaacgctaattattaagttattaataagtttttggtgaggctgttgaggggatactatgcatgattcattaaccattgccttgttgcaggcgcgtgaagcggcgatggcctactttcgaccgatcgtcaaacggcacaatctcaccgaacagcagtggcggatcgtgcgaattctcgccgaacgtccgtcgatggactttcacgatctggcctttcgcgcctgtatcctgcgccccagtctgaccggtattttgacgcgcatggagcgggatgggctggtgctgcgcttaaagccagttaacgatcagcgcaagctgtacgtctcgctgacgcctgccggaactgcgctgtacgaaagcgcccaggcggaggtggaagagacctatcgcctgctggaggcccagttcaccacggaaaagctgcagcaactgacctccctgctggaggagtttattgcgcttggcgtccctgccgggcgcggtgatgaagaagagtagcggttacggctcggcgctcggccgggcgagggcaataagcgtttccgcgcgggcgggggacagcggctctctcggctgcggcagcggccagccgtacaaccagcgggcgctgggtcagtttggcctgcagccagtcgtcggcggcagctacgtcgccgcagcgcacatcttcgcaacggcacagcaggctctccggcgtcgccgcgtttttcaacgactccgccagccggaaggtgcggtttatggcgtcggcgaagcgctgccagcgccgggagcagcgcttgctcaatgatattcgtcacgtcgcctccggcctggttcatcgtatccgccaccgcctgcaggccgcccgcgctgcagcagaggatcagtttctgccagtaaaccacgccgccgccgtcggcggtttcaaacagcacgctgtgcgcggaggggcgggcattcagccgcgcgccgttcacctcccggatggcggcgatgtcgttggggatttactactggggcgcgcgcagctgcctgccgcaggctaactttagcggagacgaagaagagtaaaggagaacagtatggagtcggtaactctatcgttacctgaagcttatgacctggcgctggaggtactcagcgccaatggatttagcgccgaccacgcggcggcgattgcccgcaatgtgaccgccggggagcgcgacggctgcgcttcccacggcctgtggcggctgttgggcattgtcgataccctgcgcaaaggtaaggtatcgcccgatgccgagccgcagatccatgactaggcgccggggattgcgcgggcggacgccgggggcgctttttcactgctggcctacgagcgcgcgctgccgctgctgctggagaaggcgcgccacaatggcattgcggcgctggcaatcaatcgctgcgttcatttttccgcgctgtttgccgatattgagccgttgaccgaggcagggctggtagggctggcctgtacgccaagccacgcctgggtcgccccggcgggcggcacacgtccgctgttcggcaccaaccccatcgccttcggctggccgcggcgggataagccgccgtttattgttgatatggcgaccagcgccgcggcgcgcggcgagatccagctgcatcagcgcgccggcaaagcgctaccggaaggctggggaatcgacagtcagggacagccaacgaccgatgccgcagaggtgctgaacggcgcgatgttaacctttggcggccataagggctcggcgctggcggcaatggttgagctgttggccgggccgcttatcggcgatatgaccagcgccgaatcgctggcgtgggataacggcgcgggcggtctcccctacggcggcgagctgattctggcgctggatccgcagcgctttctcggcgcgcaggcaccagagcagctggcgcgcgccgaaacgctgttcatgggtatgcaggaacaaggggcgcgtctaccgggcgagcggcgttttgcctgccgccagcagagtgaacggcagggggtcattatcagtcgttcattgcatgatgagatttgcgccttgcgccggggcgggtaaggcgcgaagcgccgctacccggatgcctgtcaaaacagcgtgtcgagctcgtccagcacgttgtagtcgtcatcgaccagcagcaacgtcttccacttatcaaaggtcagacacgggtgcgaggtgccgaacagcagaatatcgccgacctgcacatcgctgcccggcgccaggcgcagcatacagtgctgatccatgatgccggtgctgacgatcgactccgcgcgcagcgctaactgctggccattacgataatgggcgatcggctgcggcagcccggcgtcgaaagcgcagtcgcgcttgccgaaattcactaccgcgcgatccgcctccggcaccgattgcaccatcgccatcagctccagcgctgaagtgagatcgccggcgagatcgcaggcaatcggatcgcgggcgatcagctcttgttgggcgagatcgtagatcccgcgatcgtgggtgatataacagccagggcgaataacgatacggcagcggcgcggttttgccgccgccagccagatgttgcacaccacgtcataccagacggtgcccgcgccggtgagaataaattcgccgtcaaccagcggctccatgcggcaggcaagcgccgcggcctgctgtaacagcgcttccacctgcggctgcggatcgtcgccgtgcagcaccccttcatacagttccagaccgcgtagccgtagccccggcaggtcgcttacccgctgcgccagcgccagcgcgtcatcaacgctacgacagccgcagcgcccgccaggcacgccaagttcaatcagcacatccagcgtttgtccctggtctgcgaagaatgcggagagggcgtgcacgttgacctcgctatcgacgcagcagataaaatccaccgcccgatagtgggcttttagctgcgcgaccacctgcatattggctttgccgaccagctgattgaccatcaggacgcgttggatgccgctggccattgccgcgctagcctgccaggcgctgcccacgccgatcccccacgcccccgctcgctgctgcgcctgaaatatccatggcgtcattgtcgttttaccatgcggtgccagcgatacgccgcgggcgtcggcgtagcgctgcatccatgaaatattattttccagtgccgacttttttagcagcgcggcgggtagacagacctcttccgccagcagattagccggcgcggacatgaaggcggatttgtgcgggatgatcggtgctgaatggtatttcataacactatcctttcagggtttataatcggttagtcgctgggtatcatttataactatttgataaatatatttttaacataaaaatgttattcgttttgaataaaagtatcacaaaacgatctgagttttgcgtagttttccactgttttttgcgcttgtaaatggttaacttatcggcatgtcgaaagggagtaattgctatgaaagttgactggcttttcaaaaacgtcacggtgatcgacgggagcggcgggccgcaataccgtgctgatgtggcggtgaagggcgatcgaattatggctatcgccccggcgctggacgttgcggcggagcaggtgattgatggccaggggcgggtactggcgccgggctttattgatgtgcatacccatgatgatatcaacgtgatccgcatgccggagtacttgccgaagctcagccagggggtgacgacggtgatcgtcggcaactgcgggatcagtgcggcgaccgccaccatgcggggggaagtgccggacccaatgaatctcctcggcgagcagcagcactttatctatcccaccgtggaggcttatgcccatgcggtggaggcggcgcgaccatcgctgaatgtcggcacgttaatcggtcacaccgcgctgcgtaataaccatatggacgatctgtttcgtccggcgaacgagacggaaatcgccggcatgcgcgtacagctacgcgatgcgctgcgccagggagcattagggctcagtaccgggctggcctacgccagcgccttccagtcgaccaccgaggaggtgatggcgctggcggaagagctggcggccgggaagggcgtctataccacccatttacgttcagagtttgagccgattctcgaggcgctggacgaagccttccgtattggtcgccacggcaacgtgccggtggtggtttcgcaccacaagtgcgccggggcaaaaaactgggggcgtaccaaagagacgctggccttttttgatgagatgcgccagcagcaggatatcgcctgcgactgttatccctattccgccagctcgtcgacgctggatatgaaacaggtgaccgatgagtttgatatcgtgatcacctggtccgaagcgcagccggagctggcggggaaaacgctgcagcagatcgccgatgagtggcaggtgagcctgcacgacgccgcggcgcggctgatgccggcgggcgctatttatcacaacatggatgagcaggacgtacggcgggtgatgcgctatccggtcaccatgattggctctgacggactgccgaacgatccgatgccgcatccgcgcctgtggggcgccttcccgcgggtgctcggccactatagccgcgacgagcagctattcccgctgactaccgcggtacacaagatgaccgggctgtcggcggcgcgcttccagctggcggatcgcgggctggtgaaaattggctactttgccgacctggtgctgtttgacccgcagacggtgcgcgatgtcgccagtttctccgacccgaaacgaccggcggacggcattgaggcggtgatggtcaacggcgtgatgagctacggcagtgataagaaaattaccggacgggcagggcgtttcctgcgtcgtcggatggactaaggagttgagtatgagtatcaagcgttatggcgtagaaggtggtaccggtaccggcgggcagcacctgccgttcgcgcgggcggtggaagcgggaggctggctgtacgtttccggccagacgccgatgaaaaatggcgaagtcgtggaaggcgggattgtcgaccagtcgcgtctggcgattcagaactgcgtagatatcatgaccgaagcgggctacaccctggccgacgtggtgcatgttaaagtgatcctcaccgatgcgcgctattttcagtcgttcaataaggtatttcgcgagttctttggcgacaacccgcctgcccgcatctgctgcgtagcggacctggtggtggattgtaaagtcgaagtggatgtgacctgttttaacgctgcgcgacaataacgctcgaaacctaaaataaatccctccctttgcgggagggagcatcaaaaaagtgtgatatcggcaccagagtgaataaataaatcggtgccactgggttcgctatgccttttttcaggcatggttcctgttaactcataatattcagcggcacgaatattatttattacgtctggatgtgagccatgaataatatgtcatttatgatttggttttccgtttatgcctgcgcgatgattaccttaggctggtacgtttcgcgcaaacagaaaaccggcgaagactttttacttggcggtcgttcgctgccgatgatcctcactctcggttcgacggtcggcaccatggtggggaccggctccagcgtcggcgccgtcggctttggctacagcaacggctgggccgggatgctttacggcctcggcggcgcggtggggatcctgctggtggcatggttattcgcaccggtacgtaaacttcgcttcatgaccatgagtgaagaaatgtcgtattacaccggcggcagtaaaattattaaaaacctcgtcgcgatacttatttttattgcctctatcggctggctgggggcgcatatattaggcggcggattatatctggcgtgggccagcggcattgatattaatgtcgcgaaaattattatcgcgctggcttttgtggtttatgtcggtatcggcggctattccgcggtggtgtggatcgataccattcaatcgatcgtgctgttcgtgggctttattttaatggcgatactggcggttcatcacgttggcggctggagccatattcagcaggccgtcgatccggcggcgcaaagcctgttcgcggtcgataaattaggcgtgctgccggcgctatcattggcgatggtgattggcgtcggcgtgctggcgacgccttcttatcgccagcgtatttactcggcgaagaccgtctcctcggtgcgccagtcctttaccattaccggcctgctgtatctgggcttctccttcctgccggcgatcatcggtatggcggtatggaccatgaacccgcagctggaaaacagcggcttcgccttcttgtttgccacccaggtgctgccgccggtgctggcgatggcgatcctgattgccgggatgtcggccaatatgtcttccggtagctctgatgccatcgccgcggtgtccatcatgctgcgcgacctctacaccctggtgaccggccatatgcccgcgccggagaaagcgattcgcctgtcgcggatcttcctggttctggtgattgcgctggcgctgctgtttgccctgacctccaacgacatcatcagctacatcaccaaaatgatctcaatgattatgtccgggatgtttatctgcaccatgcttggccgtttctggacacgctttaactggcagggcgcggtcgccgcgctggccggcggcgccggggcatcggttgcggtgctggtggatagcgactggctggcgttctggggcaacccgtgtattccggcggtgctgacgagcctggtggcttcggttgtggtgacgttactgaccccggccagcagcatgagccgcgagcaggctctggagatgattacccgcgagcgtgaaagccgcccaacgccgccgccgctgccgattggcaaacgtcatacctcacgcgggtaaggggtaatcatgaacgagtatattgccgtcgattggggctccacccagctgcgggcatggcggatgcgtgatggcgaatgcatcgacaagctgaaactgccctgcggcgtcacgcgtctgaacgggcagcgcgccgaagcggtatttcagcagcagatggcgccgtggcgcggtgaccccgcgctgccggtggtgatggcgggcatgatcggcagcgatgccggttggcaaccggtgccttatctggcctgcccgctggcgctggaggcgctcaacggtcagttatatgaggtggcggaaaaagtgtggatcgtgccggggctgaaagtggcgcaggctgcagattacgacgtaatgcgcggtgaagaaacgcagctgctgggcgcctggcaactgatgcccgcggagtgttacgtgatgcccggcacccactgcaaatgggtgcaggtgcaaaacggcgtggtgcgccagttcgccacggcgatgaccggcgaactgcatcacctgctgcttaaccattcgctgctcggccagcaactgcctgcgcagttgccggatgaagccgctttcgccctcggtatggaaaaagggttaaatcagccggcgttattgtccgggctttttagcgcccgcgccgcgcgggtgttaggcgcgctggcggcgacttcggtgagcgattatctctccgggctgttgattggcgcggaggtggcgacattcagcgaacgctatcgcgccagccgcgtggtgctggttggtgagcactcgctcaacgcccgttatcagcaggcgatggcggcgcgtgggttagccgtttcctgttgctccggcgaggcggcgtttctttcgggtatagcgaggatgattgatggacaagattaagctggtggcgattttacgcggcattcaacccgctgaggcggcagatcatattgagacgctaataaatgcaggctttcgctatatcgaaatcccgctcaattcgccggactggcagcaaagtattccggcgatggtgcgtcagtttggcgagcgggcgatgattggcgcgggaacggtgctgaaggttgaacaggttgattttctcgctgaagctggggcgaaacttatcgtgacgcccaatacggccccggcggtgatccgccgcgcggtagataaggggatgctggtgtgcgccggctgcgcgacggcctccgaggcgtttagtgcgctggatgccggggcgcaatggctgaaaatctttccgtcatcagcattcggcgcggactatattcgcgcgctaaaagcggtgttgccgccggaggtgccggtgctggcggtcggcggcgtgacgccggaaaatctggcgacctggatacaggcggggtgcgccggtgccggtctgggcagcgatctttatcgcgctggacaggccgtggaacgtacccgcgagcaggcggagaggtttatctccgccagtaaaagttagtcccccagcggctgccgatcgacgccgccgcggtggctgtcgagcgccagcttaatacggcgtaatttgccttttgcctgggttttgttggccatcgccagttcggtggccagcacatcgaccatcgccagcatcgcgtaacgggaagtgctgggcttaaagatatagtcgttttcccgtaccagcagcggtagcaccagatccgcctgttcagccagcggtgttccggcgggggtaatcgcaataaccttcgcgccgtactggctggcaatcgccgcgctctcgatgatttcccgggtatagccgcccagagacagcacgatcaccacatcctgcggcgtcaccgccgagctcatcatgcgtaccagcagaccatcgctctggctgactaccggcagaccgaggcgaaacaggcgatactgaatttcctgagcgcagatggtcgaaccgccgcccatccctagggcgaggatctgccgcgcatcgctcagccagctcaccgcgcgcttcagcgcctcgatatccagcgcccgccggttggtctccagtacgctgatgattgactcatagatcccctggacgccttcgagatccggaacatcgaggataaaccgctggccgaccgcaagagattgcgcaagcttcatcttcagctcgcggacgtctttacagccgagcgcccgggcaaaacgggtgaccgaagcctggctggtttgcgtcagacgcgctatctcggcgatgggcagctccgccgccgccgcgacatcatcgagaataaactgcgcaatgcgtttttcggtcgccgtgagttccacaaagcgatcggttatgcaggaaataatatcgattgaccaggacatacggtaacaacgggtaagttttgaatggtactttgtaccatattgcgccgctgaaatcagtgctgaagtctacaacgccaggcgcatggcgcagcgcgactcgggcggcaggccgtgccgggtctcctgttccctttttgccgccagcccggcgggcagggtcagctcatcgagcatggcgaatcccagacgggtataaaacggcgcattccacggcacctcgcggaaggtggtgagggttaccgccgggtagcccatctgccgtgcgctctcgataacccgctccagcagcatccggccgatgccctgttgctgccaggcctggtggacggcgacttcgacgataaataacgcatcgtcgagcggttcggtcagaataaagccaacgggttgcccggcggctaccgccagcaggctatgctccgtttccagataatcatgatggcgcgcaacgctaatcacctcgctgtccgccagccaggcgagagaagggatctggcgaaatgcctgggcggcagaacgttcaatggcgggcagaagggcgatatcgctctcctgagtcaggcgtaatacggcaccggcagttatagtgttagttttcatcacctcagcatagcagccttcgggagaaaagtatggagctgaccgccgttcccgccacgcagttcagcagcgtgcagttaacggatattctcaacgcctgttttgaagcctacctggtgcctgttacccagtcggtagagggatttgttcagcgttttagcgccgaggggatgagcttggtcgattcccgcgtctggctggccggagatgaaccggcggcgatcgcgatcgtcgcgcgccgggggagtgccgctcgcctggcggcctttgccctgcgcccgtcctggcgcggcaaaggcctgggccggaaactgatgcaggagctgctgatgcttttgcaacagcaggggatcgagacggtattcctggaggtgatccgcgataaccatgcggccgtcgcgctgtatcagtcgctgggctttacgcgacgctatgggctctgcggctacctgagtacagaacttctgcccccggtgccgggcgtattacagctttatcccaccctgtccctgcttcggcgcgccattgaggagagtaacagccagcttccctggctgctggatccgcttaccttcgccactctgccatgtcaggtcgtgacgctggaacagcgcgccttcgcggttctaacgacggcgggctcgcgccctgtactgtcgtttttgtgggtggagcccgccgcccgccgccaggggctggcgcgtgagctgctgatggcgctggcgcagcagttcccgggcattggtacttcggtgacggtcccggaaacttttacgccgctgtttgccgcggccggttatacgccgctctcgctgcagcagtatgaaatgacgatggatctggccgacgcgaagtcggcttagccaggagtgtgcgctggaccgcaaaaaaacagcacgggccgtcgataagcctctcttttcccgcatcatatcccttcgtaatggcgaagagggggatgcgatgcgtaaaacggaactgttggcttttttgcaaaatcagaccgattttttcgatccggataacctgagcgaggtctttaccgccagctggctggcccggcgtttcgcgatgcaaagaaataccgccagccattatctcaatcagctggtcgctcaggacgtgctggtgaaaatcaacacccggccggtctattttctgcataaaaaagccttttgccagcagttctacccgctttctcgcagtgagtatgccagcatggcggagttactcgcggagagcgaccgccagccggagcaggcggaccatttttcgttgctgaccgggcatgacggcagcctgcgtaaaccgattgagcagatgaaaaccgcgctgttttatcctaacggcgggctaccgctgctgatcactggcgacagcgggaccggcaaaagctatatggctgagctgatgcatgagttcgccatcgcccaggggctgctggcgcccgatgccccctttgtgagctttaactgcgcgcagtatgcgagtaatccggagctgctggccgccaacctgtttggctacgtcaaaggcgcgtttaccggtgcgcagagcgataaagcgggggcgtttgaggcggcaaacggcgggatgctgtttctcgatgaggtccatcgcctggatgctcaggggcaggagaagctgttcacctggctggatcgtaaggagatctaccgggtgggggagaccgcgcaaggcttgccgatttcgctgcggttggtgtttgccaccaccgaagatattcacagcacttttctcaccaccttcctgcgccgaattccgatcctggttagcttgcccgatcttcaacaccgtagccgcgaggagaaggaggcgctaacgctacagtttttctggcaggaggcgcgcacgcttgccgcccggctgcaactaacgccgcgactgttgcaggtcctgacgcagtatgtttatcggggcaacgtcggcgagctgaagaatgtggtgaaatacgccgtggcgtcagcctgggccaggtctccgggccgcgaaatgctgaccgtgaggctgcacgatctgccggagaatgtcatggccgcgacgccagcgctcagcgaagcgatgggcctgcaggagccgctgcttatcgagccgcagaccagcctggtctggctgctgcgtgcgcgcgacccggtacaggggctgatctatgacgttcagtgtcgggttctggcgcagtatgaagcggtgctgaataaaaaaacggtctgggaagaggcgcaaaggagcatgggggaagagattgaaaccctcttcgatcggctgatctttgataatcatgactccagtagctcgcagatgctgctgctgatcgctcatcaggttcgggaggagtattatcgcctggaaaagcgcttcaatatccagtttaacggcaactgcctctacgcgctgagccactacctgatccaccgatcccgacagccgcagtccacgataaacaatgaaaaagcccgccagctggaggacttcctggtacagaagtttccgctgctgtatcgcttttgcgaagcgatcctcggtgcgttgacgctgaagctggatattgaaccccagcgtatcgacctgctgctgttagtgctgtggttccacaagaatggcgccatcagccagcagcaggtgacccgggcgataattctcgctcacggttacgctaccgccagcagcatcgccaacgtggcaaaccgcttgctgaaaagccagctctttgagtcattcgatatgccgctggacgtgacgccggaggctatcgctaaccaggtgatggcctacatagagagccatgccctggcatcaggattgataatcctggtcgacatgggatcgctgaacgccattcaccgccattttaatcgtcgcctgagtacgccgatggcgatcatcaacaatgtctccaccggtatggcgatgtacgtcggggagcgcattttgcagggcgttatgctggaagatatcgtccgcgagatcggcgatgaccttgcggttgagcaccagctctattacccgcaaaccgataagccgcgggcgattttaaccacctgcgcgaccggtctgggcgcggcggcgaatctgtcggcgctgttaaaagccagcattcctgaagcgcttggcattgatattgtggcctgtgatgtggagacccttgccgatcacgcgcgacgggagccgatgctaagccgctatgaggtgctggcgatcgtcggcaccctggatccgcatcttgccgatctaccctggatctcgctggattcgctgatctctggcgaagggagtcgtccgctgatgcgcatttttggcgaactggcgacggcggagcaggtcagcgagatcaacaacctgatcctgaaaaacttttcgctgcgccggttgatcgagtcggtgacgatcctcgatacggctaaggtgatcaaccaggttgagcagtttttgctgcgctatgagcatctggccgggcgcgatgtacctaacgatcgtaaggtcgcgctgtatgtgcatatcagctgtctgatagagcgattaattcgtcacgcttccccagcccaatacactggagggcagtgtccggatcgcgagctggctacgctacgcgaggcctttagtgtcatagagagcgggtatagtgtcaaaattcccgttgtagagctctgctacattcacgatatcctgacgcgggaaacagaatttattcaggaagatcaagacttttaacacatctcttcttttttatccttgcgttagccgacgcgccactgtttctggcacgtcggttgcaattaagaaagcagtggaatgcgctttcgaggtaaggatgaaacgacactatatttttgccagccatggcagctttgctaacggtttgttgaactccgtggaactgatcctcggtaaacaacccgatatacataccttgtgtgcctacgtggaagaagaggccgatctgacgcagcaggtggaagcgctaatggcgcgtttcccggcgcaggatgagctgatcgtgattacggatatttttgccggtagcgtgaataacgagtttgttcgttttttatctcgcccacatttccatttattatccggtttaaatctgccgttaattattgacttgctgatttccgcagccgaagacgataccgaaaaattaattaccgaggcattaacaaacgccaaagagagcattcagtactgcaatcaaacgattgccagcgcgatgactatggataaagacttctgaaatgaggaagcatgatgattacattattaagggtagaccatcgattacttcacggccaggtggccttttcctggacccaatatgtcggcgccgattgtattttaatcgccaacgatagcgtccctggtgatgagctgcggaaaaccaccattaagcttgccaaaccgccctcggtgaagctggtgattaaaaatgtaaatgattctattgaggcaataaaaagcggggttaccgataaatataatttatttattgttgtggagtcggttaatgacgcctggcgtattgccagcgccatcgacgaaataaaaagcataaatcttggcggaataaaggctaaagagggcagtaaaaatatctctaaggcgattaatttactgccgacagaaatagaacagctacaacaactggtgggcaagggcgtcgaagtggagattcgccaggtcccgaacgatcgcaaacagctttttgcggaatgcgtgtaattccggaggacagattatggtagaggctctcttactgggtctggtggcgtttatcgcgcaatcggaatatgccttagggacgtcgctaatttcacggcctatcgtcaccgggctgttgaccgggctggtgctgggggatgtacagaccggcgtcattatgggcgcgacgctggagctggcgtttatcggctctttctccgttggcgcctcgatcccgcccgacgtcgtgaccggcggtattctcggcgtggcgttcgccattacctctggcgcaggcacagaaacggcgttgctgcttggcctgcctatcgccacgctgactttgatcctgaaaaatatctatctggggatgttcattccaatgcttagccaaaaggcggacgggtatgcggaacgggcggatctccgcggcattgagcggatgcatttgattgccggattcggcctgtcgctgatgcttgccgcggtggtcaccgtctcattcctggtgggcagcaacgcggtgaaatccctgctcgatacgatcccggaatttatcaaacatgggctcagcgtcgccaccggcatcatcccggccctcggcttcgcgatgctcgccaggctgctgattaacaagaaagtggcgccgtattttttcctcggttttgtgctgatggcctatttgaaaatcccggtgaccggtatcgccattctcggcgccatcgtggcggtagtcatggttaacgtcaccgcgttgaattcacctcgtatcacgacagaacaaggagtcagcgatgacgacgaagatgatttctgaagagaccctgcagccgcaggcgcaggaagaaacccggattacgccgcgcgatttacgccgggtgttctggcgctctttccagatggagttctcgtggaactatgagcggcagatgaatctcgcctttgtttacgcgttgatcccggtgctgaagaagctctatccgcgcagagaggagctggccgcagcgctgaagcggcatctggtttttttcaataccacgccgcatatcgtcaccctgctgctggggatcaccacggcgatggaagagaaaaacagtcagcagaaaaacatggatgccactgcgattgataacgtcaaagcctcactgatgggaccgttagccgggctgggtgactctttcttctgggggacgctgcgcctcatcgccaccgggatcggcaccagcctggcgctgaagggcaacatcctcgggccgatcctgtttctgctggtgtttaacgtgccgcacattctggtgcgctggtgttttacccgctggggctacgtactgggcaccggggtcctgcagcggatccagaagagcggaatgatggagagcctgacctacggggcgtcgattatcggtctgatggtagtcggggcgatgaccgcttcaatgatcgatatcaccattcctctctccttcggcgccggggaggccaaaacccaggtacaggacattatcaacgacattctgccctgcatgctgccgttggtgagttttggcatcgtctactggctactgggacggaaagttaaaccgctctcaattattggcggcatggcgctggtgggcattctgggttcgtggatcggattgttttaacgggagtgagctatgcgaccaacaatgatgacatatatcagtgaagagccagcctgcctggcgcagatcctgcgcgactaccgacaaaagctagcgccgattgaaaccttcgcccgccagcacccggtacggcggatattattgctcgcgaccggatcgtcgctgaatgccgctctgtgcgcgcgctatttctttgagcaacgcttcggtgtgctgcttgacattaaagagccgtacaacttcacccattacgacgcgatcgacccgcatgccgatctggtggtggcgatttcacagagcggaaaaagcgcgtcgacgctggaggcgatgcgtaaggtacaggcttccggcaagtcggttttcgccctgacctcagatccgcaaagcccgataggaggcgccagcgatggcgttctggatattaataccgggatcgagagcgtagggtttgtgacccgcggctttagcgcgacggtgctcaacctgttgctgatagcgctgatcattgctcgtaagcaggagaaagccagcgaggtcgaggagcagcactatctcgctgaattgcagcggctggtagcggcgatcccggaggttatcgtccgcacctcgcgctttattgaccgccatagcgaaacgctgcgcagcggcgagcgctttgtcgccaccggctacggcgcgctggttggcgtggcgaaggagttcgaaaccaaatttaccgagacggtgcgcgtgccttccagcggctttgagctggaagcctatatgcatggcccctatctggaagccaatgcccgccatgtgatgctgtttattgaagatacgccggacgcgcgaacccgggcgctgcgcgactatctggcgccgtccattggccgggcctttaccctgacgctgggtgacgaagaggatgctcaaacgctggcgctaaactgtccgtgcgagcatcacctggcgcctctgctgctgattgtcccagtgcagatgctcgcctggcataccgcaggactgaaaggcatcgatctggctaaacgtattttcgacgattttgaccgcgtcttaaaaagtaaaatctgaaaattcaggagaaaactatgttgggttttaatcaggacgagtacctgaccagtgctcgcgagatcatcgctgcgcgtaaacaggctgaaaccgtagccgacgatatttatgacagcggctgtagcgcattattttttgcttcggtaggtggttccctggcgccgatgatggcaattaatgaatttgccaaagaattaaccagcgtgccggtatatcttgaacaggccgcggagttaatccatcgcggacataaaaaattaaataaagatgcggttgtcgttacgttatctaaatccggcgataccaaagagtcggtcgccattgccgaatggtgcaaggcacaggggatccgcgtggtggctattactcgtcacgccgactcgccattggctgccgccgccagctggcatattccgatgtgccacaaaaatggcgtggaatatgaatatatgctgctgtactggttattcttccgcgtcatttttcgtcacggcgagtttgctgattatgcgcgatttgccagccagctcgagttactgccggaaaatctcctgcaggcgaaacgccagttcgatccccgagcggatagcattgccgcgcaataccatgactgcgactatatgatgtggattggcggcgcggaaatgtggggcgaggtctatctgttctcaatgtgtattctcgaagagatgcagtggaagcggacgaagtcggtgagctccgctgaatttttccacggcaccctggagctgctggaaaaagaggttccgctgtttctggtgaaaggcgaggggagatgccgggcgctggacgaacgcgtcgagcgttttgccgaaaaaataactgaccatctggtggttatcgacccgcgcgactatccgctgaacggcattgatgacgcgttccgctggattatggcgccgtgcgtggtgtccaccctgctggtggaccggctggcggcccactttgaacaccataccggccacgacctcaatatccgccgttactaccggcagtttgattactaagccgtgttgatggcggccagccgggctggccgccatgctattctccgaggcgcttcccagaaaattgtcgtcaaacccaaccgggtaaaaaccggtgatagagtccggcttaccttctctttcaggcaagcggatggccatgaaaaaacggatgacctcgacgccgcacgatgcggtctttaagcgatttcttcgtcacccggagacagcgactgatttcctcaccctctaccttcccgaagcgatccttcagcggtgcgatttctctaccctgaggctgcaatcggcgagctttatcgatgaggatctgcgcgcctggtattcagatgtcctctggtcggtgcagaccacctgcggcacggggtatgtttacgtggtgatagagcaccagagctcaccggatagccatatggcctttcgcctgatgcgctatgcgattgccgcaatgcagcgccacctggatgccgggcacaaaacgctgccgctggtggtgccgatgcttttttatcacggtgcaaccagtccgtatcctttttccctcaactggctggatgaatttgccgacccgcagctggcgaagacgctgtatggctgtccgtttccattgatcgacgtgacggtgatgccggacgatgacatcgtgcaacatcggcgagtcgccttgctggagctgatgcaaaaacatattcgccagcgcgatctcagcggcataacggagtcgttggcggccgttgtgatgctgggatacactaaccgtcggcagttgagaatgctgtttcactatatgctgcagtacggtaatacggccgagccgggcgtgtttctccgccggctggcccgccgtctgccacagtatgaggagacattgatgtctatcgcgcaaaagcttaagcaggaaggtcgggaagaaggccgggaagaagggcacctggagggcttgcaggaaggcagccgacgcgaggcgctgcgcattgccggcagtatgttacagaatggcctcgacaaagagatggtacagaagatcaccggactgtcggctgatgaactacagccgctgtgtggttaacgtcctgccacgacaaccgctgcccggcgcgaaaatccgccgggcaggattgcgttagccttcgcttttcaccactttgatctccaccatgccgatccccaactgacgcggggagtggccgaggatattgccctcgttagtggtttgcgggtccggcggggtgatgatcagcgtgttgctgcgcgttgggttgtcaaaatgcagcgtcgtggtagtcacgtcattatccagagtgagcacttgctcactttctccaactcgcaccggaatcggcttattggcgtttgggccataagctttggcggtgatcaccagatcaaatttctccggcaacggctctttatattcaatcttcacgtcgctgcccaactgagcattggaccaccgcccccacgactcgggacgcgaaataccgctgaactgtttaacctcttccggggcgccagcgacgttaaacacgaagctgtcggccttatagcgaatatcgttgtcgacaattttcagcgtatcgacgttgcccttatagcgctccatatcgataagggtgtccctgaaggcggtcttgccttgccactgcggcttatcaacgtgctggaccttctgctcaccccccagctgtccctgcgagacgcaccagtcggtggagagcgccagctcaggcgaccacagctggcccattttatagcagcgatcgacccacacgaaattatcccgtggcgcgaaatcggccagctggaagcgcagcggcgcagagtattcactctctggcagcggttctacgcgctggtcagatacccgcagcagcagcggcagacggaaatggctgccggagaaagcgatcatatttttctgcgagtcgatggtgaaattcttcatttctttggggaaattccacaggcggatcacgtcaggcttccatgccaggactttctctttcatattcatgaaaataccggagagcgactggccggagaggctgctacgcccgaggccgatatagttatcgccgccgagaatatccagcaccgtcgcgccgttatccatggtgttgcgtttcaccgccagggtctcctgctgcggtttatcgccgcgcaggacgaagaatagattgctgcgatcgtgcttgttgagataatcccaggcgctgttcttcatggccaggtgatcggaagagaccacgatgaccgtgtttttgaaatagggtgaggctttaatcttctctatcagcgcggcgatatgttcctgactgcagctaacggcgctgaaagagaggtttttcttgccgtccacatcatagcgtttacgctcgcaggtgcgtgagataaaaccgtcgggatggtgggtatccaccgtcagggcgaagagcgagaagcgtttcccggactgcgacagctcttcgaattttttccaggtctcgtcgagcacagtgtcgtcatagaagccccagtcgttgcggtaggtaggatccgccaccgtagtttttagctcttccgccccgtacaggtgatcgaagccgtgggatttaagaaacacgtctttgccggcaaagcgcaggttagccccctgcacaaagtaattctcgtaaccggagttcttcagaatatcgccaaggcaaatattctgtggaaagaagctggagactgaggctgaggcattaccttcgaacggcgcgaacagcggaatgccgcactgtgaggcgaccatgccggcgatagtgtaatcggtccccggcagctgcatggtattgctgaaatcaatggcctcagctttaattctgccaagctcaggggtgaggttggggaaggcgtcgttatcaaaataggtgcgctcgagactttcgccatagatatagaccaggttcagctgcggattgtcgatttgcttcgacggctctttatagtacgcggcaaagtctggatcgccctcgcgtgactgggatttcaccagctcgctgatctgatggaaggccgggctggcatcaacggaggccagcgccagcagtagcgccgccaggctgtaaccgacgtgatgaggatgatgccgacggcggcgcagcacccagccgagggcgccaaagacggcgaccagtgcgacggccacgccgacccccggcagtatatatttgccgatcccggcgccggtcaggctgttggtcagagtgtagagtaccgcgtcgttgatgccgtcgccggtgaagtagtcactggcgtagagggtgatattcagcaccacgaacaggcctaacaccgtgagcgtggcggcaaaccaccaggtgttacgacccgctttccaggcatacagcaccaccgaagctaaaaataaggcgatggataacaactctgacacagctcatcctcattaatgccagttatcggctggcagaacagattacttttcaagccccactgtaattgcagcgccatcttgctgcaattctagcgtcatgaaagtgtgcagttattcagaattggtttagaagttgccttttttgatcggcatcgcatcgggtggaatgggaaaacggaacaggaaaactgcaaaaaaaagcgtttcaggccgcggcgccgccgcgaaggcaacaaatgcggccttgtcagtcaggatcaggagaggaaattaacaccctgttttaagaccagatcgcaggctttggtttttacctgtttcgccagcgagctattgccgagcgtattcaggtccaactgctggccgtttttgctgttgagcagcccctgcaggccatccagatagctggtgtcctgtttttgtttttccggcgtgctaagccccagtttatccagcacctgatttttgacgttatcggcgctggtcacggaggccagcttctgtttcgcgcaatatgacaggatcccggccgcattattcatgctgctggcggtcagggattggctgctgccgttaagcaggctggttagcgaggagacggacatgccgccgctggcctgggcgttactgccgctgagctggctggcagcgctgttaagggaatcctgccaggaggcggcgtgggcgccagagagggtaaacgcgctaacggcaagcgcggcaacaacgctatttttaaacgatttcatagacggactcataagcgtgactgaataatcgctttagtataacgccgtcgtcgcccggaaatctcttaatactccttgcctgtaacgcggtgccggtaactttcccaattgaagataacccacaggctgttgccgagccgcatacggtccatcacccgctcgccgagcagtttgttcatctcttccatattgctgttggtgagcatcccggtaggtcgtttggaggatgagcgccggtcaactatctgattgataatgaccttttcatagcgagactctgtctgcataccaatttcatcgatcaccagcaggtcgaccatgctgaggtcgttaagcaactgttcttcgctcgtttcccggttgccgaaggtatctttcatcgccgacataatatcggccacggtgatgattaagaccgacttcccgcgcagcagcagctcgttgcaaatggctgccgccaggtggtttttgccagtgcccggtttaccggagaagataaagctggcgatattgccatcgaactcttccacgtactggcgcgcccgggcgagcgcattcatctgcccctcgcactcgacgcgatagttatcaaaggagcagttctgatgcagcgggcggatccccgagcggttgaaggtgcgctgcattttcatcgcgcgattctctcgctccagcgcttcggaacgcagccggccttgctctttttgccaggccagcagctcttcgccggttttaaacgccggttcaatatgtgccggcatcattttctgcaggcgtttcatcaggtcgccaacgtttttcatgctcatcctcggaaacctcgcggaatatggctgtcgggttcgctaacgctgttcacatcgcgcttcggctgtccgccgttgctggcgcggctgatttgcacgctacgcgccagcttctgctgccactgcacgtggtgaaagactttaccttccgcctgccagtaagcgacgaaagcggccagctcttcgggggtaaccggctggctcagggcaatgccccacagcgcggccaggcgctgaaaatcggcgtcaggccgccacccggcgtacatagcaaatttgcccatcggcaccgcaaccggcgccgcggcgggctcctcgaaaaactgcgggtcaagcgcgatgtcgctgccggggcgcgccagcctggcttccagctccagcagttgcgccagccgcgctggcgtcagcgcatagaatgccggcgcgttattggcaaaaacggcaacggtgccgtcagtcgattttgccagcagcgccgcgtgctgctggaggaactcttccaggccgctaaaatgggaggttaaaattcgcgaagacataactctatctcaactctgaactgcaaagagtggggtgatctgcacatagtagcacagaggctatcgcggaaggagcgtcgcggattaaccgcgacgtcggggttagacgcgaggacgcttacgatacagccacaggccgggtatcgacaggccaatcgaaagggcgcccacaatcgaagaggcctttaaaaaattgctcagcagcaaaatcatcatctcttctgaataaccaaaatgactgatttttaccgcggaaatcatcgccgtgtaggctgagatgccaggaaacatcgggatcacggcggcgacggtaaaaatcttcggatgcgccagataccagcgcgaccattgaatgccaatgctgcccaccagcagagcggcgagaaaggtggcccattcaatgttaaaaccggcgctcatcatgatcatacgcgagccatggccaatcgcccccagcagcgcgcaccagcgcagagcgcgctgagggacattaaagaccatcgcaaacccgacggcggggatcgccgccagcagcatgtcttccgccagcgcaaaaataaatgagattatgcccatccgcgcagcccccatacggtcatggccatcaccacgccaatgcaggtggcgagggttagcaggctggcgatcgcccagcgggcgagtccggtattgatatgccctttaaacatatcggcgacggcattgattaatggaaaacccgggaccagcagcaggacgctggcggccatggcaatggtcggcgtgctggcaaacgccgggaggcgcagcagcagcccggagatggtggtggcgacaaaggcggtgatgcagaagttgatctgcggatgcatggagcgatgggtcagcacctggcgaatgtacatggctaccgtgctggcgcagaagctgaccagcgccccatcccaaccgccgttattcagtttgcagaaacaggcgcaggaaagacccaccatcagcaccagcagccagcgcggatagcgcaggggaacgatctgcgcaaaacgcttctcgacgtcgcgatagtccagcagcttatgctcggcgaggatcacaatgtgctgcacttccgtcaccacatgcatattaatgccgcgatcgacatttttgcgcgtagaggtaagacattcgccatttttaatggtggtcaggacgatggcattcgaagagatggcgctttcaacgctgtccatccccaacgccagcccgagacgtgttgacagttcctccaccagcgcactctcggcgccgtgctgtaacagaaaaagaccacactggatgcataaacgtgtgattgcccgctgctgtgtccgatcaacctgcatacttcctctattgtccacgacgcctggtatctgccgatactttaacctgaagcgcagtggcggctgaggggggtgggatcaaataatgtgcaaaaattcccggtctgcgggcggcagaatttgaagcatcccacacttttgccagtttggtgaaaagtgcaatttttgtcgccattcatcccttctttttccccactgacttatcaaaaatgcagaaaagcacttttattaaacaaaaattatacaaataattaaccctgcaagagtgagacatccctatgaagacacaggtcgcgattattggcgcgggcccctccgggctgctgctggggcagttgctgcacaacgccgggatccataccgtgatccttgagcgtcaaacgccgcagtatgtgctggggcgcatccgcgcgggaattctggaaagcggtaccgttgatctgctgcgcgaagcgggcgtggcgcagcggatggatgccgaaggcctggtgcatcatggggtggagtttctatttgacggccagcgggtgcccgtcgcactgagcgagctaaccgacggtaagagcgtaatggtttatggccagaccgaagtcacccgcgatctgatggctgcccgggccgccagcggcgcgccgatcgtctatggcgtgagcgaggtggctatccatgacgcgaaaagcgaccggccgacgatcacctacctcagcgaaggggaaacctgccgtctggagtgcgattttattgccggttgcgacggtttccacggcgtatcgcggcaaagtattccagctggcattttgcagacctacgagagcgtgtggccgtttggctggctaggcctgctggcggatacgccgccggtcaatccggagcttatttatgcgcaccatcagcgggggtttgtattgtgcagtcaacgctcactgacccgcagccgctattatctgcaggttccgctgagcgataaggttgaagcatggtcggacgagcgcttctggcaggagctgaaaagccgcttgccggaggagctggcatccaggttagtgactggtcactcacttgagaagagcattgcccccctgcgtagcttcgtcgtggagccaatgcaatatgggcggttgttcctggtaggggatgcggcgcatatcgttccgccaaccggggcgaaaggattaaatctggcggcatcggacgtgaactatctgtggcggattctgcgcgaatactaccatcgtggccgcagcgatctgctggcggcctactcgcaactggcgctggatcgggtctggaaaggggaacgctttagctggtttatgacccgcctgctgcatgattttccggatcagaacgcgttcgacgctaaaatgcaggccgccgaccgccgctactatctgggctcgcgcgccgggctgaccaccatcgcggaaaactacgtgggcttgcccatggagcgtgtcgcctgaattaagaggagtcatcatgccgttcgttcaaaccgtgcccgtatttaagctgtatggcgaagagtgcggctggccgacgccggacctgctgcactgtgagtcgattttacagcgcagcagcctgtatcagtggcatattcgcgtccatcagcatgcggaaatggtccagcttctctatctgcatcaggggcgggcggagatcgaaattgaaggcgccaccgcggtgatgacggagtcctgcatccaggtggttcccgccctctgtattcacgggtttaatttttcacccgggacgcaagggtttgtgctctctctggcgctgccgctgctgagccggtttgaaaatcagttcggtcgccctctggatgtgcttagcgtgccgcagtgtgtgccggtgggccgttctcgcgggcgcatgcatacgctgttttcagcgcttcgcgaggagtactgcgaagagcacgatgcgcgagaaatgatgctctattcgctgctggggacgctgttggtctggctgaaccgacagtgccatcccgcgtcccccgcggaagataaagcggagcggaagcgcagcatgatgcgtcacttcgcccgccttatcgagagccactaccgacagcatctcccgttggcggagtatgcgaagctgattggactgtcggttacgcacttaaattatttatgtcgtgagttttatggctgtagcgctcttggagtattgcatcagcggttgatgcttgaagcgcgacgcaatctgcagtacacccgcatgacgattacacaactctctgattatttggggtttagcgatgcagcctatttttcgcgttttttccgtcgctatagcggtatgtcacccaaagcatttagagaaacaattaaagataatgcttcataatgttcagtactgaaattatttttgctaaataatgtttttatcttttctaatttattagcgcaggaatgtctgtgttaatattaatcgcaagtatacacggcaataatattttacacggtatgaccacggttcggtcgttacgtatatcgtgtgcgcaggccatgaatatgattttaatattcatccaggaaatgatatggcgataaagtcgctcgccgatcgtttgcaggcaagcgaaggaacttcgacaggaagcggaggtgttatgttaccaggacaaggtaagtttggcgtcgttattagtaaaattcccgtcatgcaatcagggttaaaggtgatcttcaatgagaacctccctgattacgaactgagtttttgtcgttctcatgatgagctcacccttttacaactgcggcgggcggtgctggttgtcgcggatatctccggcgagattgcgcacccccgagccgtctgcgagcgttattactccctcatgacccagtaccgtgatattcactgggtttttatggtcagcgacagcctctatccgttggccgttgagctattaattcgtcctgaaagctcgttgatctccgagagcgagccggttaaccggctgattgaggtgatttgcgccggtagccgtgcggctgaacagattagccgtacgctgtttgccggggatgaggacagcgatttcgcaagctaccactctgcggcgatgctcactctttcagagcgtaaagttctgcgccttctggcgaaggggtggggaataaaccagatcgccgcgctgttgaaaaagagtaataagacgatcagcgcgcagaaaaacagcgcaatgcgtcgcttatcgctacgcagcaacgctgaaatgtatgcctggatcaacagcgcgcagggaatgcaagagctgaatatcaattcagcttacggggagcaaatggaatggaaaaaaatagtacaacccgccatgtcgccatcgtagaaaaatgcgtgatgacggaaatggcatggcgctatatctttagtcgtgaagataatcgccgttatcatattcatctgtttaaaaatgtcagtatgctcagggcggcggaaataccgtttccctggtcaaccattattttttctctttcgggaagtcgttcttcacgagccgagagtctgctctttgttcatgaaatggcgcggtgccggccggaagtccaaacgattattctggctaataatgaaagtgaaatgcacctgatcggccatcttatgccggcctgtttgcacggcatactgaataaatccgcgccgcgacgcgggctacaggagcgtttgctgcagctactggacaatcatcatctcagcggcagcgaacaattttgcgacagagaggcgtgcaacgatccgctaagcccgacggagcacgccatccttcggtatatgtcgtggggatattcgctttctgatattgcgatacagctcaaccggaatattaaaacgatccgcgcgcataagtttaacgccatgaccaagctcggagttcgctcagacattggtttattaaacgcggcggatatcctgttgcatttaccgctcaatagtacgaccagcgccgttaaacaggtagcgtaatgcggctataaacacacatctacccatgttgcatcggtgagctgcgccatgcgttctggttcaatgcgaaccgcgctatggatggctcccgctgcgggtagtacttcctgataatgtctgagagagacgtcgcagtagactgccagcggattttccaggccaaacgggcaaacgccgccgaccggatgaccggtccaggtaaccacttcatcgctgcttagcatgcgtgctttcgcgccaaaggtctctttcagctttttattatccagccgcgcatcgcccctggcgacgatcagtacaatcttatctttgatcttgagcgacagcgttttggcaatttgccccggctcaacgttgtgtgcggcagcggcaagtgcgacggtggcggtactctgatttaactcaataatttcgatatcgggggcgtgttcggcaaaaaactgccgtacagactgcagactcattggattctcctgatttaagcctggttaaatctgtcacaagcctggcggagtgtaaatatcagcgcggacaatccagattctttctattttgtcgatctccttcacaatcgccgtaaccggttactgtaaccggttgcggttatctgcattgagatgaatactggaacagtcacttctccttttatttataacaaaagagccgtgtatgaatcgttgcctcatgagcagtatagccggttgcacatccgccagcggcctgctgcgtcaaaaagcggtcatcgtaacggcagggtaatcgttgttgggccagtatcaatagcctgtcaggagggctactatgtctgctaaccatgctgcgtttaatttgatatttcgctttgtagaaaattacataagccccatagcagggcggatctcgtcgcagcgccacgtcatggctatccgtgacggatttatctcagcgatgccgtttatgatcgtcggatcgttcctgttagtgtttgcttatccaccgttctcaccggataccacctggggttttgcccgcgcctggctggatctggcgaaagagtttgaggggcgtattctgaccccctttgatatgacgatggggatcatgtcgatctacatctgcgcggcaatctcctataacctcggtaagcattacgagaaatccaatcagctcgatccctttatgtgcgcaatgctgtcgatcatggcctttttgctgattgccgcgccgaagaccaatggcacgctgccggtggatagcctcggggggaccgggatctttaccgccatcctggtggcgatctactgcgtggagatgatgcgtttcttgaaagcgcacaacattgggatccgcttgccggaccaggttccgccgatgatcaaaaactcgtttgatctgttgatcccggtgctggtggtcgtgctgacgctctatccgctgagcctgtttatccagcaccattttgacatgctgatcccgcaggccattatggccattttcaagccgctggtttcggcagccgactctctgccggcaattctgttggcggtgctgatcggccacctgctgtggtttgccgggatccacggtgcggcgatcgtgtccgggatgctgcagatgttctggctgactaacctcggtatgaaccagcaggcgctggcccagggcgcgcctctgccgcatatctttatggaggcgttctggaccttctttatcgtggtcggaggttccggggcgaccatgggactggtgttctgttatctgcgcagccgttcagcgcatttgcgctccattggtcgtttgagcgtggtgccaagcctgttcaatatcaacgagccggtgatcttcgggacgcctatcgtcatgaacccagtgttctttattccgttcctgctggcgccgatggtgaacgcggtgctggcctgggcggcaatgaagctggatctgattggccgcgtcatctccgtcgtaccatggacggcgccagcgccaattggcggcgcctgggcgttgggctgggatttccgggcggcgattctggtcattgttctggcctgcgtgtcggcaatcatctacttcccattctttaaggtatatgagaaacaactgcttgctcaggaagcggaagaggccgagcgggcggagcaggagagtcaacagaccgcataaatagcaacgggcggtaaaggccgcccgttacttttcaggtaagtggtaattatttaagcgtacagtcgccgcactgttggacatccggcaggcgatagcgctgacagcaggtgcgtcggactaactgcccttcacgcagcatcaccgttcgccacagcgggttatcctggccatcggcgagttgtttttcaaaaaaacagtgctgacgtagcgcggcaagccgctcatcacccagcagcgcgcgcatttccccaagataccagttaatcagatagccggtattgctccagataagtttgctattgatttcgcccgtcgctgccagcgcctcaacaaccggctgcagggtgcgcgttaccagggcatccattcgcgcctgcggtgaaagcctctcgatgtcggcatcgctatgcacatcaatccagaagcaggccgcccggccgctttcatgaaactcgacatggaaatgttctggcgccaggctgaggccttgcggttcattgagcagcgccagcatcagcggcggcaccagcaggccgatataccattgtgcccagagcgagagcagaggcttctgttcccgaggcagcgtcggctgatgacgatagatatgatcggaccaggtggccagcagggagcgcaaggcgatgggttgcgaccattcggcaagcgttaacgcgtgccgtggggcgggttcgtcaagtcgcaggaaatcaagcaggtgtgggcgcagggtggcgattttttcccgaatactctccgccagggcatgctcagccgtcggcaaaggagcccgccagataagttcatcgctgagaggaagggaacgccaggccattcgatttccagatacaaatctaaatgataatgattactgatattagttgcttgcaggcggcatggcaaggcttttatcggcgccgcgatgtcgcagcgcgcgcaggtcaactggcaagaataatgttgcggcctttatttttggcctcatagagtgcgccgtcggcgcgcgccagcgcttgttcaatgttgtcattaatgagcggcgtcaggccaatactgatggtgacgttggtggcgacgctttcattaaacatatgcgggatcttcaggtcatagacccgctgacgtatacgctcggctgtcttccaggccgtttcttcgctgctattggtcagcagcaccataaactcctctccaccaaagcgggcgacaatatcgcgtgagcgtacagcgttgcgaatggcagcagagacgcgaataagcgcctggtcacccatcatatgaccatagtgatcgttataggccttgaagtgatcgatatcgaggagcagcacgtagtggttgtcgccgtccagcgccagcagggtatcgaggcggttctgcagtccgcggcgattatacaaaccggtcaggggatcgagcatactgagatcgttgagcgtattgcgttcatgcatcagtttatccattaaaccctgcgtaaaggcatcgctgcgcttctggataatattttgcagggtaataccggctataggcagcataaagcagtaagtcatacgcaaccattgttccccctccgccattatcaggcaggcaaggaaagttggtaaagagtggagggtaaaggcagtgatattattggaaaaagcgatggtgccgataaacagaatgcttaatagggcgatcaccagatagttaaaatgcggcggtgtcaatagcatcgcttttgtcactacgtgccatgcccatagcatgccaaataacaacgagatagtgggaatatttattttcgattgcggccatttccagtgccagagcagcagcagcccgctgcagacgacgatcagggcgcagggcagcgtaaaacgaactaccgtaaataggggggtgaccagcgacagcgaggaagaaatgaaattaagcagtaaaaaaagccgtaaggaatattgatatttttgtgcgtagtgtgctcgccaggtttgtgcagtcatatcggaagaatcattattagtcgttaaatttcaaaatgatgaaagccaaaaatgaagagtctgataacaatgtgcaaaaaannnnnnnnnnnnnnnnnnnnnnnnnnnnnnnnnnnnnnnnnnnnnnnnnnnnnnnnnnnnccttcatgaatgtatgtcattaccgcgaacgtaaagaaaaaggggcagagcacgtcgcaaatgacaaatgataaagattatcatatgatattggttatcattatcgttgtgagaggtgaaaccatgctgcagcgagcattaggaagcggctggggagtgatgattcccggcgcgctaattgtcgctctcgggtatgccggagtgtcggctgacgtatggcgggtactggtcgcggtgggcatgctgatgtccgcggcgatgatctggcatcgtcaattgcgccattttatcctgctgccatcgtgcgtcgcattgattggcggaataatgctgatgattgtggatattaaactgagaggataatgccgggagagggaagaatattggtgcgagggggggacttgaacccccacgtccgtaaggacactaacacctgaagctagcgcgtctaccaattccgccaccttcgcacagtattctttctttgggatattgcctcgttggtgcgagggggggacttgaacccccacgtccgtaaggacactaacacctgaagctagcgcgtctaccaattccgccaccttcgcccagtgcgagcaatatcttcgtggattatggtgcgaggggggggacttgaacccccacgtccgtaaggacactaacacctgaagctagcgcgtctaccaattccgccaccttcgcataccatcgatactctgaaagtatcgttaccacggaggcgcattctagtggttttcggcgacacgtcaatagttaattatgcaggttgtatcgattgctgcaaaaatgggcggatttgcccgcgggaagcgccagcggtaccaggagcgggccgccggcgtgaaaagacgattattttttcgcctgacgggtcataatggtgcgatagaccttaaagcgcccggtctgagcgatcacctcatggaagccgaacgtctcatccagcacctgcggatacggcaggaaggcgttggcgacaatgcgcagctcgccgccgctgttcagatggcgaaccgcgccgcggatcagcgcctgggcggcttcgagactggtctgcaggccgtcatggaatggcgggttggagatgatcatgtcgaagcgaccattgacctcggagaagacgttgctggcaaacacatcgccagccaggccgttggcggcaagcgtcgcgcggctggcttcaaccgccggggcgctgacgtcgcacagggtgaggcgcactttcggcgaatggctggccagcgcggcggccagcacgcccgcgccgcagccgacgtcgagcactttccctttggtatgcggctcgagggtggagagcagcagctggctgccgacgtccagaccgtcgcggctgaagacgcccggcagggtttttatcgtcagattatccagtgtgtattcgccccagaatgcgtcggcgtcgaaggtcggctgcttttccagacggccatgatagaggccacagcggcgggcgctatccactttgtttaatggcgcgtattcagccagcatctgctccgcgctgcggacgccgctgcggttttcaccgacgacgaaaatgtcgcttcccaccggcagcagagagagcaggttcatcagctggaactgcgcctctggtttgttctttggccagtagtagatcagggtgtcgcattcggcgacgtcagcggcctcagccactaagctaaaacggacggtgtcacccatctggcggttgaggacctgccagtggtggaactgttgggtgtgggcgcggctggccgcggtatccagacgcgcaggcaggtcatcctgcaggtcaccggcaaacagaacgcgggcggactcgaaatcatcactgtggcgcagcaagacttcacttgccggggtaaaagcggacatgaaacactccttcattaagactggcgccgattatagtagtttgttggcgcagatacgacggatttgctatattgcgcgcttgtttaacaggagtgtttcgctatgacatcccgacgagactggcaattacagcagctgggcattacccagtggtcgctgcgccgaccgggggcgttgcagggcgaaatcgctatctcgcttcctgaacatattcgtctggtgatggtggcggaaaccccgccgtcgctgacagagccgctgattggcgacatattacgcgcgctggccgtgacgccagatcaggtcctgcagctgactccggagcgggtggcgatgctgccgcaggacagccgctgcaacagctggcggttgggcacagaggcgtcgctgccgctggcgggcgcccagatgtccacccccgcttttgatgaactccagaccagcgcgccggctcgcagggcgctctggcaacaaatctgcgcacatgaacacgatttctaccctcagcacggctgatttaaccaaagcctggcacatcgaaaaacgcgcccacgctttcccgtggagcgaacagactctggccagtaaccagggggagcgctattgcaactatcagctgtcggtagatggcgaaatggcagctttcgccattacgcaagtggtactggatgaggcgacgctgttcaatatcgccgtcgatcccgcgtaccagcgccgcggcctggggcgagcgctgctggagcatgtcattgatgaagtcgaaaaactcggcgtcgtcacgctgtggctggaggtgcgagcatccaacgttgccgccatcgcgctgtatgagagcgtaggtttcaatgaggcaaccatccgccgcaactactatcctacggccgacggacgcgaagacgccattattatggctctgccaatcagtatgtaacacaaggtgatacgatgaaatgggactggattttctttgatgccgatgaaacgctgtttacgtttgattctttcagtggcttgcagcggatgtttctcgactacagcgtgacctttaccgccgaagattttcaggactatcaggccgtgaacaagccgctatgggtggattaccaaaacggcgccatcacctcgctgcagctgcagcaccagcgttttgacagctgggcggaacgtttgaatgtgccgcccggggaactcaacgacgcgtttatgaatgcgatggcggaaatctgtgccccgttgccgggcgcggtctcgctgctcaacgcgctgcagggcaaggtcagaatgggcatcatcaccaacggctttacctcgctgcagcagactcgtctggagcggacaggtttacgcgatcactttgatttgctgattatttctgaacaggtgggtgtcgccaagccggacgcgcgtattttcgattatgcgctggcgcaggcgggtaacccaccgcgctcgcgggtgctgatggtcggtgataccgccgagtcggatattcgcggcggcgtgaacgccggactggcgacctgctggctcaatgcgcatcagcgcgagctgccggcggatctcgagccggactggacggtgacctcgttaagcgaactggagcagctcctgtgtaaacactgattgcctcccccccgttgatgggtaaaatagccgcaatttttcgtattccacatgcgtggcccatggccgcgtttacttagaagattaattatgacgttgtctccttatctgcaagaggtggccaaacgccgcacttttgccattatttctcacccggatgccggtaagaccaccatcaccgaaaaggtgctgctgttcggacaggcgattcagaccgccggtacagtaaaaggtcgtggttccagccagcacgcgaaatccgactggatggagatggaaaagcagcgtggtatctcgatcaccacctcggtaatgcagttcccgtatcatgactgcctggtgaacctgctggataccccggggcacgaagacttctccgaagatacctaccgtaccctgacggcggtggactgctgcctgatggtgattgacgcggcaaaaggcgtcgaagatcggacccgtaagctgatggaagtcacccgtctgcgcgatacgccgatcctcacctttatgaacaaactcgaccgtgatatccgcgatccgatggagctgctggatgaagtcgagaacgagctgaaaatcggctgcgcgccgattacctggcctatcggctgcggcaagctgttcaaaggcgtttatcatctctacaaagacgaaacctacctgtatcagaccggtaaaggccacaccatccaggaagtgcgtatcgtgaaggggctcaacaacccggatctcgacgcggcggtgggggaagacctggcgcagcagctgcgtgacgagctggagctggtgcagggggcgtcgaatgagttcgacaaagatctgttcctggccggggaaatcaccccggtcttcttcggaaccgcgttaggtaacttcggcgttgaccatatgctggatggcctggtggagtgggccccggcgccgatgccgcgcaacaccgacacgcgtgaagtcaccgccacggaagagaaattcaccggcttcgtgtttaaaattcaggccaacatggatccgaaacaccgcgaccgcgtggctttcatgcgggtggtgtccggcaaatatgaaaaaggcatgaagctgcgtcaggtgcgtatcggcaaggacgtagtgatttccgacgcgctgacctttatggcgggcgatcgctcgcacgttgaagaagcgtacccaggcgatatcatcggcctgcataaccacggcaccattcagattggcgatacctttacccagggcgagatgatgaagttcaccggtattccgaacttcgcgccggaactgttccgtcgtattcgcctgaaggatccgctgaagcagaaacagctgctgaaagggctggttcagctctctgaagagggcgcggtccaggtcttccgcccgatcgctaataacgatctgatcgttggcgccgtcggcgtgctgcagtttgacgtggtggtagcgcgtctgaaaagcgaatacaacgtggaagcgatttacgaatcggtcaacgtggccaccgcgcgctgggttgaatctactgacgtgaagaagttcgaagagttcaagcggaaaaatgaagttcagctggcgctggatggcggcgataacctgacctacatcgccccgacaatggtcaacctgaacctgacgcaggagcgttaccctgacgtggtgttccgcaaaacgcgcgagcactaatccctgacgaagcgcggctcaggccgcgcttttttctggttacgcccccgttcccttccttctggaaagttcttaaaacaccgctaattcgtctgttttttatccatatcctccgcaaccccttcgtctgtctactatatttaattcgtgtttttaaaaatgctggcgtaattcactgcgataagacgccagcgctggtgaaaaaacgaggacataacgatgaccagactaaagaatgccaatatgttgctggcgctcttcttaggcttagccgcgttgaacgcctcggcagagacggaaaaaacaacggtagacagtgcgaagtcggctgccagcaatgcgggagaggcggtagataattcgattaacaaagtcggcgattttatggacgacagtaccattaccgcacgggtaaaagcggcgctgatcgatcataaagatattaactccggcgatatttcggtgaaaacggagaataaagtggtcaccctcagcggcgacgtcaccagtgctgaacagaaaagtcaggcactgagcgtagcgaaagaggtcaaaggcgtctcacacgttaacgacaagctgacggtccatcataaatcatcgagcgagacggcgacgctgaaaggctatgccggggataccgccattaccagcgaagtgaaagccaagctgctggcggatgacattgtcccttcgcgcaatgtgaaagtcgaaaccaacgccggcgcggtacatctgaccggtacggtggcttccgcggcgcaggcggagcgtgccgcagagattgcgaaagcggtctccggtgtgaaaagcgtgcgcaacgatcttagcgttaagtaaaccgagttattaacaaaagtgttgtctggccaaggttgccgaacgaatagcagcatccactgagcgatgagctatacagaaagggtgcgcaaaccgctgttcaccgtccattatggtaaggagaaaagtatgtttcgatggggaattatttttctggtcattgcattaattgctgcggctctgggctttggtggtctggcgggtacggccgctggcgctgcgaaaatcgtctttgtcgtcgggattatcctgttcctggtgagcctgtttacaggacgcagacgtccttaggcggcccgcgatgcgggcgatactgaagcctaagcatttttactgacacgtcatcttacacaaagccagtcctgaggactggctttcgcggtttaagcggcgggcaaattgcgttaccttgtcaggagaagatcaatcgaacaggaaagcagggtggggcaacgcattcccgtcacgctgggcaatatcgccccgctggcggttaaacccttccgaccaggcaagctggcgctggtatgcgaaggcggaggacagcgagggatttttactgccggggtgctggacgaatttatgcgcgccggatttaacccctttgacctgatgctgggtacttcagccggcgcgcaaaacctctccgcctacatgtgtaatcagcaaggctatgcccgcaaagttatcacccgctacaccacttcacgccagtttttcgatccgatgcgctttgtgcgcggcggcaaccttatcgatctcgactggctggttgaggccacttcgcagcaaatgccgcttgccatgaactatgccgaagcgcagttcgcgttggggaaagagctgtggctatgcgcttgccgcggtgacgattactccgccagctatttttcgccgacgccgcaaacgtggctggatctgatccgcgcctccagcgccatccccggcttttatcgcagcggcgtgttgctcgacggcgttagctacctggacggcggcgtcagcgatgctatcccggtgcaggaggcggcccgccgcggcgcccagaccatcgtggtgatccgtaccgtcccttcgcagatgttttataccccgcagtggttcaagcggatggagcgctggctgggagagagtagtctgcaaccgctggtcaatttggtgcatcatcacgaaaccacctaccgcgccatccagcagttcatcgagaaaccgccgggtaagttgcggatcttcgaaatctatccgcagcggccgctgcgcagcatggcgcttggcagccgactaccggcgctgctggaggactacaaaaccgggcgccagtgcggccgttatttcctggcaacggtgggtaaactactggccgaccagccgccgctgctgcgccacgcgccgcgtattgcccggcccgcgccggtggtggtgccgccggtgccggtggccaatgaagcgccccaggcgaccatcattcctgcgccccaggcgaatgaccccagttttgatcatgaggatctggcgtgacgcaccgttttatcgatacccactgtcactttgattttcccccctttgcggcagatgaggtcgccagcctggcgcgtgcggcgcaggccggcgtcgggcgaattatcgttccagccatctctgctgagcgttttagccgcgtgctggcgctggcagctcagcacgaagcgctgtacgccgcgctgggtatgcatccgatcgtcatcgaagagcatactgatgagggactggcgcagctggaagccttgatggcgcagcggccgcctaaactggtggcggtgggagagattggcctcgatctttatcgcgacgatccgcagtttgatcgtcagcaggcgctgctggaagcgcagctgaggctggcgaagcgttacgatctgccggtgatcctccactccagacgcacccacgataagctggcgatgctgctgaaaaaacatgccctgccgcgtaccggagtcatccatggctttgccggcagcctgcagcaggccgagcgcttcgttcagcttggctataagatcggcgttggcggcaccattacctatccccgcgccagtaaaacccgtgaagtgatggcgcgtctgccgctttccgctctgctgctggagaccgatgcgccggatatgccgctaaatggctttcagggacagcccaatcgaccggaacaagctgcacgggtatttgaggcgctgtgtgaactgcgttcggagtcgccggcagccatagaagaagggatcatgcacaatacgctcgccttgttttcccttcccccggtctctgtatggtgatcgatttctcataattgtccatccatatcattgatttgcttaaaatgtgtgaagccagacgggcaggatagtttcaggccgatataatcacgcggttagtactggactatcaaaaacacagggaatctgtatgcaaatcctcatgggacttatcggcatggtggcgctattggccattgctgtgctgctctccaataaccgaaaagccattaacctgcgcaccgtgctcggcgcctggataatccaggtgggtatcggcgcgttaatattgtatgtaccggccgggcgcgcggcgctattagcgatgtcgaatggcgtcgccagcgttattgcctacggcaatgaagggattagtttcatcttcggcgggctggtctccgataaaatgttcgaggtgtttggcggcggcggcttcgtctttgccctgcgcgtgctgccggtgatcgtcttcttctcgtcgctgattgccgtgctttactacctgggcattatgcagctggtcattcgcattctcggcggcgcgctgcgggcagtgctgaagacctcacgtaccgaatcgctgtcggccacggcgaacatctttgttggccagaccgaagcgccgctggtggtgcgtccttatatcgccaccatgactcgctcggagctgtttgcggtcatgtgcggcggcctggcctcggtggcgggctcggtactggcgggctatgcgcagatgggcgttccgctggagtaccttattgccgcgtcgtttatggcggcgccgggaggtctgctgtttgccaaaattatcgtaccggaaacggacaaaccggacgataacccggctcatgacagccaaagcgctgacgcggataaaccggccaacgtgctggatgctgccgcctccggcgccgcgtctggtatgcaactggcgctcaacgtcggcgcgatgctgctggcgtttattgcgctgatcgccctgctgaacggcatactctccggcgtcggcggctggtttaaccatcctgagctgtcgctgcagatgatcctcggctggatcttctcaccgctggcgtgggtgattggcgtgccgtggcacgaagcgacggtggcggggtcgtttatcggccagaagctgatcattaacgagttcgtggcctacatgaactttggcgaatatttaaaggcggatgccgaagtggcggcggccgggctgcaggtcatttcagatcacaccaaagccattatctctttcgcgctgtgcggctttgccaacctgtcatcgatcgccattctgattggcggactcgggggaatggcgcccaaccggcggcaggatatcgctcagcttgggctacgtgcggtagcggcggggacgctgtccaacctgatgagcgccaccatcgccggggtttttctcgccctgtaagcctgtctcctgaaccagcggccaccgtgccgctggtgttgctgtaaatgtgataattccatcaccactctcttttttgaaaaaagatttatatttcaatttgtagcgtttttatttcccgtaaattgggcaaaatgtgcgccacgctatcgagtacatctgttattgtgtgttagaattatcacattctcatcggcggtatagtatcgattatgcttaagaggggactaacgataattgctgcggtattgagtggtaatttgtgatcttaatcacgttacagtaatgcaaattagtaagtagttttcattaactgtgatgaatgtcgaagtgtaacgacgagcgaatgttacaatagtaacagactcgcaaggtgaacaaactattgatccggcatgacgccggcggagtatgaaatgactgatttaaaagcaagcagcctgcgcgcgttaaaactgatggacctgaccaccctgaatgacgacgacaccaatgagaaagtcattgccctgtgtcatcaggcgaaaacgccggtgggtaacaccgcggcggtctgcatctacccgcgcttcatcccgatcgcccgtaagacgctgaatgagcaggggacgccggatattcgcatcgccacggtcaccaacttcccgcacgggaatgacgatatcgacattgcgctggcggaaacccgcgcggcgatcgcttatggagcagatgaagtggacgtggtcttcccgtaccgcgcgctgatcgccggcaacgagcaggtcggtttcgagctggtgaaagcctgtaaggatgcctgtgcggcggctaacgtgctgctgaaagtgatcatcgaaaccggtgagctgaaagaagaagcgctgatccgtaaagcgtctgaaatctctatcaaagccggggccgatttcatcaaaacctcgaccggtaaagtgccggtgaatgccacgccggaaagcgcgcgcatcatgatggaagtgatccgcgatatgggcgttgagaaaaccgttggcttcaaaccggcgggcggcgtgcgcagcgcggaagacgcgcagcagttcctggcgatcgctgatgaactgttcggcgccgactgggccgattctcgtcactatcgttttggcgcatccagcctgctggctagcctgttgaaagccctgggtcacggcgacggcaagagcgccagcagctactaatcccttgatttgccggatggcgctgcgcttatccggcctacgaattgatgcctgtaggccggataaggcgctcgcgccgtcatccggcaatttattctctttgggaggttaccgtgtttctcgcacaagaaattattcgtaaaaaacgtgatggtcaggcattaagcgatgaagagatccgctttttcatcaacggcatccgcgacaatactatctctgaagggcagatcgccgcgctggcgatgaccatcttcttccacgatatgtctatgccggagcgcgtttcgctgaccatggcgatgcgggattccggtaccgttctggactggaaaagcctcaaccttaacggtccgatcgtcgataaacactctaccggcggcgtcggggatgtcacttcgctgatgctggggccgatggtggccgcctgcggtggttacgtaccgatgatctccggccgcggcctcggccataccggcggtacgctggacaaactggaagcgatcccgggcttcgatatcttcccggacgacaaccgcttccgcgagattataaaagatgttggcgtggcaattatcgggcagaccagctcccttgccccggccgacaaacgtttctatgccacccgcgatattaccgcgacggtggactccatcccgctgattaccgcctcgattctggcgaagaagctggcggaagggctggatgcgctggtgatggacgtcaaagtcggcagcggcgcgtttatgccgacttatgaactctctgccgcgctggccgaagcgatcgtgggtgtcgccaacggcgccggcgtgcgcaccaccgcgctgctgaccgatatgaatcaggtactggcctccagcgccggcaacgccgttgaagttcgcgaagcggtgcagttcctgaccggcgaataccgcaacccgcgcctgttcgacgtgacaatggcgctgtgtgtggaaatgctgatctccggcaagctggcggcggacgatgccgaggcgcgcgcgaagctgcaggcggtgctggataacggtaaagcggcggaagtgtttggccgcatggtcgcggcgcagaaagggccgagcgactttgtcgagaattatgctaattatctgccgacggcgatgctgagcaaagcagtctatgctgataccgaaggttttatcagcgcgatggatactcgcgcgctgggcatggcagtggtttctatgggcggcggccgccgtcaggcatcggacaccattgactatagcgttggctttaccgagatggcgcgtctgggtgaccgcgtcgacggacagcgtccgctggcggtgatccatgccaaagacgagaacagctggcaggaggccgcgaaagcggtcaaagcggccattaaactggacgataaagccccggaaattacgccgacagtctatcgccgtatcactgaatagcgatatactgatctgatcgcttttttgcagcgcaagatgtatggagaacaagatgaaacgtgcatttatcatggtgctggactcctttgggattggcgcaacggaagacgcagaccgctttggcgacgtcggcgccgatacgctgggccacattgcagaagcctgcgccaaaggcgaggctgaccacggccgcaaaggcccgctgaatttaccgaacctgacccgtctgggtctggtgaaagcgcatgaaggctccaccggtaaaattgccgcgggtatggatggcaatgccgaagtgattggcgcctatgcctgggcgcatgaactttcttccggtaaagataccccgtccggccactgggaaatcgccggcgtgccggtgctgtttgactggggctacttcagcgaccaggaaaacagcttcccgcaggagctgctggataagctggtgaaacgcgccaacctgccgggctatctcggcaactgccactcctccgggacggtgatcctcgatcagctcggcgaagagcatatgaaaaccgggaaaccgatcttctatacctccgctgactcggtgttccagatcgcctgccacgaagagacctttggcctcgacaagctgtatgagctgtgcgaaatcgcgcgtgaagagctgaccgaaggcggctataacattggtcgcgtgattgctcgtcctttcgtgggcgacaaagccggtaacttccagcgtaccggtaaccgtcacgacctggcggtagagccgccggcgccgaccgtgctgcagaagctggtcgatgagaaaaacggccacgtggtgtccgtgggtaaaatcgccgatatctacgccaactgcggtatcactaagaaagtgaaagccaccgggctggacgcgctgttcgacgcgaccatcaaagagatgaaggaagcgggcgacgagactatcgtcttcactaacttcgtcgattttgactcctcctggggccaccgtcgtgacgtcgctggctacgcggcgggtctggagctgttcgaccgccgtctgccggagctgatggagctggttggtgaggacgacatcctgatcctcaccgccgaccacggctgcgacccgacctggaccggtaccgaccacacccgcgagcatatcccggtgctggtgtacggcccgaaagtgaaaccgggttcgctcggtcaccgtgaaaccttcgcggacatcggccagactattgcgaaatactttggtacgtctgacatggaatatggcaaagccatgttctgaggtcattgcccggtggcgcacagcgatccgggcctacgatttgtaggccgggtaaggcgtagccgccacccggcaaaaacaacaatgtaaaaggaactgaagatggcaactcctcacattaacgcagaaatgggcgatttcgctgacgtcgttttgatgccgggcgacccgctgcgcgcgaagcacattgcagaaaccttcctcgaagacgtgcgtgaagtgaacaacgtgcgcggcatgctgggcttcaccggtacctataaaggccgcaaaatctccgtgatgggccacgggatgggtatcccgtcctgctctatctacaccaaagagctgatcaccgatttcggcgtgaagaaaatcatccgcgtgggctcctgcggcgcggtgcgtgaagatgtcaaactgcgtgacgtggtgatcggcatgggcgcgtgcaccgactctaaagtgaaccgtctgcgtttcaaagaccatgattttgcggcgattgccgatttcggcatggtgcgtaatgcggtagacgcggcgaaagcgctgggcgttgacgcgcgcgtcggcaacatcttctccgcagacctgttctatacgccggacccgtccatgttcgacgtgatggaaaaatacggcattctgggcgtggaaatggaagcggcgggtatctacggcgtggcggcggagttcggcgcgaaagcgctgaccatctgcaccgtctccgaccacatccgtacccacgagcagaccactgccgctgaacgtcagacgaccttcaacgacatgatcaaaatcgcgctggaatccgtgctgctgggcgataaagagtaagagctgttgtgccgggtggcggcttcgtctgacccggcctacggttttccaggcccgctaagcgcagcgggctttttttatcagcgcactgcgccggcaatccacgccgacagttctttcagttccgcttcctgctccgggaaatcgccgaccagcgcctcgcactgctgctgtaatacttctgcccgatactgacagccgactaagcgtgccgccagggcctccagcggcgccgggttcaggctatcggtaaaggcctgcgcgcgggtgatatggcctttttcgacgtcaaaatgcagctcaacgccgccccagcgaaagcgctcgtccagaagatgagagaaggccggcgcctggccgaagttccactcccagctgctctgacgggcgaaggtctcagcaaaatttggtagatctggcgtgttgtccggggagatcacctcggcgtccacccgttcgccgtaatggctgaagaatgcttcctggatcgcctcgcaaacttgctgatgggtaatgcccggcagcagctcaaccaggttcgccacccgtccgcgcaccgaggtaatgcctttagcctgcagctttttctggtccgggttgaggtagttggcgagacggcttaaatcggcgttgagcagcagggtgccgtgatgaaaaccgcggtccatggtttcacgataggcggagccggagactttgcggtcgccgctgtcggttttgaccaccagatcgttgcgcccggaggcttcggcggttacgccgagtgaattaagcgccgccagcacaatagcggtggagacggttttgtcgtactccggtttgcctgccataaaggtaaagcaggtattgccgaggtcgtggaacaccgcgccgccgccgctgctgcgacgggccagccgcacatggtcttcctccatgcggcgggtattacactccttccacgggttctgcgcgcggccgatgaccacggtatcggcattgcgccacaggaacagcacccgctgggtggcgggcatctggcggaaaatgcactcctcgaccgccaggttgaaccacggatcgtaagagtcagagagcaggaggcgcaatgtggacattatagatttcctttcttttcatcgtcttcatcctcaaccggcttgttggcggtgagcaggaagggcgattgctgccagcgggtgcgtttgccctgcagcagcgtgcgggtcagcaccacgccgatagccagggacagcaacagcatcaggcgtaagatattggtggtattatccacctgcttcgcctcggtcgccagggtatgagtatcgagggtcagacgcaggtagcccagcgggccgttttttcctggcaccggttcgacaatctgctggttgaagtagccgccggcttttttaccatccagcgccagccggtcgcgaacctcgacgctttcgccagagcgcgccaccaggtcgccctgttcgtcatatacgccggcgtccaggacgcggctgttatgggttagctgggtcaacagctgattgatgcgcttctcgtcaggcgtctcgctgcgcatcagcggcgcgagattcagcaccacctgctgcgccagcgtgcgggccagctcttccagctgcggattgcgttgtttctgactgttctgactgaaccacgaagcgccctgcatcagcgcgacgagcagggcgagacagataagaacaatgaccgcacgatgcagccggaatttcagttttgcgcgaaccatattccacctttgaaaatttgcagcttaatgttgccagaagcgctggttacaaggtagcctcatgcgttattttcctcgcctgaatgaagagatgtggagccgtaatgcctaacagtttgacctggtgcgacctgcctgaagacgtttccctgtggcctgggttgccgctttccctgagcggcgacgaggtcatgccgctggattatcacgccgggcgcagcggctggctgctgtatggtcgcggtctggataaacgtcggctgacggcgtggcagcgtgagctgggcgccgcgttagtgatcgttgcctcctgggtggtcgaggattaccaggtgatccgcctggccggttcgctgactccccgtgcgacgcgactggcgcatgaggcggggctggacgtcgcgccattgggtaaaattccccatttgcgcaccccgggcctgctggtgatggacatggactccacggcgattcagatcgaatgcatcgatgagatcgcgaaactggccggcaccggcgagctggtctcggaagtgaccgagcgggcgatgcgtggcgagctggacttcaccgccagcctgcgccagcgcgtggcgacgctgaaagacgccgatgccagtattttgctgcaggttcgcgacgcgctgccgctgatgccgggcctggcgcagctggtgctcaagctggaaacgctgggctggaaagtggcgatcgcctccggcggtttcaccttctttgccgagtatctgcgcgacaaactgcatctcgacgcggtattcgccaatgagctggagatccgcgacggcaagctcaccggcaacgtgctcggcgatatcgtcgatgcgaaatataaagccaatacgttgcgcaagctggcggaaaagtatgagatcccaacggcgcaaaccgtggctatcggcgatggcgccaacgacctgccgatgattaaggcagcagggcttggcatcgcctatcacgcgaagcccaaagtgaatgaacaggcggaagtgactatccgccacgctgacctgatgggggtattctgtattctctcgggcagcatgaaccaaaagtaagaggtaaacgtggcgaaagctccaaaacgcgcatttgtctgtaatgaatgtggtgcggattatccgcgctggcaggggcagtgcagcgcctgccatgcctggaacaccatcaccgagatgcgcatcgccgcgtcgccgcaggtggcgagaaacgagcgtctttcaggctatgccggtaacgccggcgtgtcgaaggtgcagaagctgtcagatatcagcctggaggcgctgccgcgtttctccaccggctttaaagaatttgaccgcgtgctgggcggcggcgtggtgccgggcagcgcgatcctgattggcggcaaccccggcgcgggcaaatcgacgctgctgctgcaaaccctctgcaaactggcggaagggatgaaaaccctgtacgtcaccggggaggagtccctgcagcaggtggcgatgcgcgcccatcgtctcgggttgccaacggccaacctgaacatgctctcggaaaccagcattgagcagatctgtcagatcgccgatgaagaaaagccgcagctgatggtgatcgactccatccaggtgatgcatatggccgacgtgcagtcgtcgccgggcagcgtcgcccaggtacgggaaaccgcggcctatttgacgcgctttgctaaaactcgcggcgtggcgattgtgatggtcggccacgtcaccaaagacggctcgctggccggtccgaaggtgctggagcactgtatcgactgctcggtgctgctggacggggatgccgactcccgcttccgcacgttgcgcagccataaaaaccgctttggcgcggtgaacgagctgggcgtcttcgccatgaccgagcagggcctgcgcgaagtgagcaacccgtccgctatcttcctcagccggggagatgaaatcacctccggtagctcggtgatggtggtctgggaagggacccgcccgctgctggtggagatccaggcgctggtcgatcactcaatgatgtccaacccgcgccgcgtggcggtggggctggaacagaaccgtctggcgatcctgctggcggtgctgcaccgtcacggcggcctacagatggccgatcaggacgtcttcgtcaatgtggtcggcggggtgaaggtcacggaaaccagcgccgacctggcgctgctgctggcgatggtctccagcctgcgcgaccgtcctctgccgcaggatctggtggtctttggcgaagtggggctggccggggaaattcgcccggtaccgagcggtcaggagcgtatctccgaagcggcgaagcacggcttccgccgcgccatcgtcccggcggccaatgtgccgaaaaaagtgccggaaggcatgcaaatctttggcgtgaaaaagctttcagacgcgctaagcgtttttgacgacttataataagttaaaaggagattagcgatgtcgtcatttgactatttaaaaagcgccattaagcagaaaggctgtaccctgcagcaggtggcggaagccagcggaatgaccaaggggtatcttagccagctgctgaatgccaaaatcaaaagcccgagtgcgcagaagcttgaagcgctgcatcgtttcctcgggctggagtttccccgccgacagaaaagcgtcggggtggtgtttggtaagttttacccactgcataccgggcatatctacctgatacagcgcgcctgtagccaggtcgatgagctgcatatcattatgggctatgacgacacccgtgaccgcgagctgtttgaagagagcgccatgtcgcaacagccgacggtgcctgaccgcctgcgctggctgctgcaaacctttaaatatcagaagaatattcgcatccacgccttcaatgaagaggggatggagccctatccgcacggctgggacgtgtggagccatgggatccgcgcttttatgagcgaaaaagggatcgagccgaaccggatctatacctcggaagaggccgatgcgccgcagtaccttgagcatctggggatcgagacggtgcttatcgatcctaagcggacctttatgaatattagcggcgggcagatccgcgagaacccgttccgctactgggaatatattccgacggaagtgaaaccgttctttgtgcggacggtggcgatcctcggcggcgagtcgagcggtaaatcgacgctggtcaataaactcgccaatatcttcaataccaccagcgcctgggaatatggccgggattatgttttttcgcatctcggcggcgatgagatggcgctccagtattcggattacgataaaattgcccttgggcatgcgcagtatattgattttgcggtgaaatatgccaacaaggtggcgttcatcgataccgacttcgtcagcactcaggccttctgtctgaagtacgagggacgtgagcacccgtttgtgcaggcgctgattgatgaataccgcttcgacctggtgatcctgctggagaacaataccccgtgggtggccgatggactgcgcagtcttgggagctcggtggatcgtaaagagtttcagtcgttgctggtatcgctgctgaaagagaacgagatcgaattcgttcatgtgaaggagtcggactacgatgcccggttcctgcgctgcgtcgagctggtgaaacagctgatgggcgagcaggggtaggggctctgcgggctgttgccctcaccccaaccctctcccaatgggagagggagcaaacattaaaaaaggcaacttgcgttgcctttttgcgttttatttcgcgatacgtttgtacttgattcgcttcggctccagcgcgtcggcgccgagagtgcgtttcttgtactcttcgtactcggtaaagttaccttcgaagaactcaaccttaccttcatcctggtaatccagaatgtgggtggcaatacggtcaaggaaccagcggtcgtgcgagataaccatcgcgcagcccgggaactccagcagggcgttttccagcgcgcgcagggtttcgatatccaggtcgttggttggttcatcgagcagcaggacgttaccgccgacctgcagcagtttcgccaggtgcagacgaccacgttcaccgccggacagctcgccaacgcgtttaccctggtcgacgcctttgaagttaaaacggcccacgtaggcgcggctcggcatctcggtgttgccgatcttcatgatatccaggccgccagacacttcttcccacacggtcttactgttgtccatcgcgtcgcggaactgatcgacggaagccagcttaacggtttcacccagggtgatggtgccggaatcaggctgttcctggccggacatcatgcggaagagggtggatttacccgcgccgttcggaccgatgatgccgacgatagcgcctttcggtaccgagaagctcagatcgtcaatcagaacgcggtcgccgtaggatttgcgcagatggctgacttccagaactttatcgcccagacgcgggcctggcggaatgaacagttcgttagtctcgttacgtttctgatattcaacgttgttaagctcttcaaagcgcgccaggcgggctttgcccttagactgacggcctttcgcgccctggcgaacccactcgagttctttctcgatagatttgcggcgtgcggcttcctgagaagcttcctgcgccagacgctggtctttctgctccagccaggaggagtagttgccttcccacggaataccttcgccgcggtcaagctcgaggatccagccggcgacgttatcaaggaagtaacggtcgtgggtaatcgccaccacggtgccttcgaagtcgtgcaggaagcgttccagccaggcgacggactcggcgtcgaggtggttggtcggttcgtcgagcagcagcatatccggtttttccagcagcagacggcacagcgcgacgcggcggcgttcaccaccggaaagattagcgattttcgcatcccagtccggcaggcgcagggcgtcggccgcgcgctccagctggacgttcaggttgtggccgtcgtgcgcctggataatctcttcgaacttgccttgctgtgcggcaagcttatcgaagtccgcatccggctcggcgtatttggcatagacttcgtccagccccttcagcgcgttaaccacttcggcgaccgcttcttccacggactcgcgcacggtgtgttccgggttgagctgcggctcctgcggcaggtagccgattttgatgccgggctgcggacgcgcttcaccttcgatctcggtgtcgataccggccatgatgcgcagcagggtagatttaccggcgccgttcagaccgagcacaccgattttcgcgccagggaaaaagctgagggagatatttttcaaaatatgacgtttcggcggaaccactttgccgacacgatgcatggtataaacgaattgagccacgttggacttcgcctctttctattttgatagatagttcaaagccgaagtgtagcctttttcgcgcgctaatcccagcgaggcgacaggattcacagaagcgtaaaaaaatgtccaggacatggcgcgtttagcgttgtctgattagcataagtaaagccgcctgccgaaccggcaggggtttttaagcggcacgatgctgcgaaaatgcaccggaaagaggaagagcttgtggaaaaagccaaaaaaatggcgtggcatcttttggctgccagcgttggtttgttgacgttgagtcagctggcgcatgcggattcactggatgaacagcgcagccgctacgcacaaattaagcaggcgtgggataaccggcagatggatgtagtcgaccagctgatgcccacgttaagcacctatcccctgtatccctatttgcagtaccgacagatcaccgacgatctgatgaaccagccggcgctggtggtgaaaaactttattgacgccaatccgacgctgccccctgcgcgttcattacgttcgcgcttcgtgaatgaactggcccggcgcagcgactggcgcggcttgctggcgtttagcccggataagccgaccagcaccgaggcgcagtgcaactattactacgccaagctgagcgtggggcagtcgcaggaggcctggagcggggcgaaagagctgtggctgacgggcaagaatcagcccggcgcctgtgaaccgctgttcagcgcctggcgcgactccggtcagcaggatccgctggcctatctcgaacggatccgcctggcgatgaaggccggcaatatcgggctggtgaaatcgctggcccagcaaatgcccgccaactaccagagcatcgccagcgccgtggtcgccctggctaacgatccaaacagcgtcctcaccttcgcccgcaccaccggggcgacggactttacccgtcagatggccgccgtcgccttcgccagcgtcgcccgccaggacgtggaaaatgcccgcctgatgatcccttcgctggtacaggctcagcagctcaatgaggatcagacccaggaactgcgcgatattgtcgcctggcgcctgatgggtagcgatgtaaccgaagagcaggccatctggcgcgatgacgcaatcatgcgttcgcagtccacgccgctggtggagcggcgggtacggatggcgttggggacgggcgatcgccatggcctcaacacctggctggcgcgcctgccgatggaggcgaaagagaaagacgaatggcgctactggcaggcggatctgctgctggagcgcggcagggatgaggaggcgcaggcgatccttcgctcgttgatgcaacagcgaggcttctacccgatggtcgccgcgcagcgtcttggcgaggagtataccttccgcatcgataaagcctcgggcaccatcgatccggcgctggcctccgggccggagatggcgcgggtacgtgagctgatgtactggaatatggataacaccgcgcgcaccgaatgggccaacctggtcactagtcgcaccaaatcccagcaggcgcagctggcgcgctatgccttcgatcagcactggtgggatctgagcgtgcaggcgacgatcgccggtaagctgtgggatcagctggaagaacgtttcccgctggcctataacgacctgtttgcccgctatgttagcggcaaagatattccgcagagctacgcgatggcgattgcccgtcaggagagcgcctggaacccgaaagtgcgctcgccggtcggcgccagcggactgatgcagattatgccgggcaccgcgacgcataccgtcagtatgttcagcattcccggctacagcggcccgtcgcagctgttggatccggaaaccaacatcaacatcggcaccagctatctgcagtacgtttatcagcagttcggcaataaccgtatctacgcctcagcggcctataacgccgggccgggccgggtacgcagctggcaggggaacagcgccggacggatcgacgccgtggcgtttgtcgagagtattccgttttcggaaacccgcggctacgtgaagaatgtcctctcctatgacgcctactaccgctactttatggggcagcaggataagatcctcagcgatgcggagtggcgccagcgttactgatcgccgggaagtatgttatgctttgtactcgttgaagagtacattcgacgggcagcgtaagctgcccgtctcaatatggtggcgcgatatgacccaacaatctccctattccgcggccgttgccgaacaacgtcatcaggagtggctgcgctttgttgccctgcttcagcaggcctatgctgaggatctgcatctgccgttgctgcagctgatgctgacgcccgacgagcgcgaagccctgggtacccgggtgcgcattatcgaagagttgctgcgcggcgagatgagccagcgtgagctgaaaaatgagctcggcgccggaattgcgaccattacccgcgggtccaacagcctgaaatcggcgccggtagagctgcgccagtggctggagcagacgctgctggctagcgataaatagcgttatggaacgggcttagcgccagcacgaccgcctggtggtaaacgctgctgcgggttaatctgccgccggtgaaaaccccaatcgccccctctttacgaccgatctgatcgatgccggtatactgcgacatgaccgggccgagggcttcgccagcgcgaacctgctcaagaataacgtcaggcaacggcagcgtggctgagcgcgcttctccgcgctggccggcgctttcgatgaccacccagctaaaggtgctgtcatcgtcgataccggcttcgatggctacccagaaatcggcatttggctgggcaaggcgcgcattggcgacgcgatttcgtgcgccagcgcgcgtttcctcgctgccgaagggctgttccggcacgccgctctcgacggcgacggactcaatgtggcaggatccttcgccgaaaatctcgtcaaaagcctgcagaattgcctgaattttggcgggattagtggtcgctgagacaacatggtgcataatcaaaacaactcagaataaactaacgtcatcgcagtatactctaaatcaccccgagggcaggcggtaatgcccgaaagcggttgataacgagtccagaacggaaaaaaagcatgttacaagtataccttgttcgccacggtgaaacgcagtggaacgccgagcgacgtattcagggtcagtccgacagcccgctgaccgcccatggtgagcgccaggcctggcaggtgggcgagcgcgccagaacgctggggatcacccatatcattaccagcgatctggggcgaacccgccgcacagcagaaattatcgccgaagcctgcggctgcagcgtgatcgccgatgcgcgcctgcgcgaactggatatgggggtgctggagaagcgccatatcgactcgctcagcgaagaagaagaaggctggcgtcgccagctggtcaacggcacaccggacggtcgtattccgcagggcgaatcgatgcaggagctcagcgagcgtatgcatgcggcgctggcatcctgtctggaattacccgccggtagccggccgctgctggtgagtcatgggatcgcgctgggctgcctggtgagcacgatattagggctgccggcgtacgctgagcgtcgtctgcggctgcgcaactgctctatttcgcgcgtcgactatcagcaaagcccgtggctggcttccggctgggtggtggaaacggcgggcgacgtctcgcatcttgacgcccccgcaatggacgagctgcagcgttaacggcggatcgggatcagatactcgcagcgcaactgaatcggcgtggcctgatcccggctttcatcttcagggtagaagcgttcaatatccagccccttgcgacgcgtcaggttcagcatcggcatgcaggtgccgtagacggtcaggatgaattcctgcagaccggtacccagcccttcatacgtaaacatgacatactcgccgccctccagggtcactggatgggcatgctgcaggtggccgttagccatctccggcgtcagcgcggtggtatagaatacttcctgctcatcgtctttttccaggctcggacgcggctcatgcagcccgtagagcaccggggggattgacggtgagttgccgaggaagtctcgccagaactggacccgcatctggttacgaaaatcggagatttcctcgagcttacaggtatagctctgggtcacgccaagcagctgagtagggggcagagtgataaactcatgtttcggcagggtaaattcgccaagacgcagcggcgggcgcataccgaacgagctccagtccggcgagcggcggtagagcgccggcgtcagcgagaattgtttcttaaacgctcgggtgaaggtctgctgggagtcgaaacggtactgcagcgcaatatcaaggattggacgggcggtcaggcgtaatgcgacagcagatttcgacaagcggcgcgcgcgaatataggcaccgatggcatggccggtgacatccttaaacattcgctgcaaatgccacttggaataacctgccttcgccgccacattatccagagaaagcggctgatccaggtgaccttccagccagctaaggagatcgcgaataatccctgcttgatccataaaatgtccccatccttaaacacaggtgcctgatattaaagtagcggataatagcattttttgatgttttagcattcagtgttttttttgcttttaaatgcggtaggtcaggggatttgaacgataattttgtaaagctgtgatctataaaccttttctgctaagtgcgtgataatcactcagctatattttttaataatggtaacaatatgaaatacaagaagtttgcgatggggctgctcctgctggccggtagccagctggctcaggcggagcagattggttccgtggatacggtcttcaaatggttagggccggatcacaaaatcgtcgtcgaagcctttgacgatccggatgtacagaacgtgacctgctatatcagccgggcaaaaaccggtggtatcaaaggcgggctggggctggcggaagatacctctgacgcggcgatttcctgccagcaggtcgggccgattgagctaacggacaaaatcaaaaacggcaaaagccagggcgacgtggtgttccagaagcgcacctcgctggtgtttaaaaaactgcaggtcgtgcgtttctatgatgcgaagcgcaatgcgctggtctatctgacctactcggataaagtggttgatggctcgccgaagaacgccatcagcgccgtgccgatcatgccatggaataaataaacgggagcgcgcatgcagcagccacggatttggttagttgaggatgaacagagtatcgctgataccctggtttacatgctgcagcaggagggcttccaggtcagcgtctttggccgcggtttgcccgcgctggaggcggcggcgcatcaggcgccagatgtcgccatcctcgacgtcggcttgccggatatcagcggcttcgagctctgtcggcgtctgctgacgcgttatccggcgctgccggtgctgtttttgacggcgcgtagcgacgaggtcgataagctgctggggctggaaatcggcgctgacgattatatcgccaagccgttttcaccacgcgaagtctgcgcgcgggtgcgaaccgtgctgcggcggctgcagaagtttgccgcgccatcgccggtggtacgcgtcggcgagtttgtgctcgatgagcaggcggcggcgatcagctggttcggccagccgctgaatctgacgcgctacgaatttctgctgttgaaaaccctgcttcacgcgcccggtcgcgtcttctcccgtcagcagctgatggagctggtgtggagcgatgcctgggaaagcctcgaccgtaccgtcgatacccatatcaaaaccctgcgcgctaagctgcgggctgtgaatcctgaaaaggcgccaatcaatacccatcgcggtatgggctacagcctggggcgcggctgatgcgcatcggcatgcgcctgctgctgggctattttcttatcgtcgcgatcgccgcgtggtttgtgctgtcgatctttgtccaggaagtgaagccgggcgtgcgccgggcgacagaggggaccctcaatgataccgctaccctgttggcggcgctggcgcgtgaggatctgctggcggcaaacccgcagcagggcaggctggcgcaggcctttcaccagctcaaccagcagccgctcaacgccaatattggcggaattaaaaaggtacgtaatgagtaccgcgtctatctgaccgatgcccggggcaaggtggtgtttgactccagcgggcaggcgacagggcaggactattcgcgctggaacgatgtctggctcaccctgcgcggccagtacggcgcgcgcagtacgcgcagcgatccgcatgatgaagccagctcggtgatgtatatcgccgcgccggtgatggataaggggcggattatcggcgtgctgagcgtcggtaaacccaacctggcgatgacgccggtcattaagcgcagcgagcggcggatcctctgggccggcggcgccctgctgggcattgcgctgttgattggcggcggcgtcgtctggtggatcaatttctctatcggcaagctggtgcgctatgcggactcggtgaccgctgagcgcccgctgccgctgccggaggttggcagcagcgaattgcgcaagctggcccaggctctggagagcatgcgggtaaagctcgaaggtaagaatgccatcgaaaactatgtctatgacctgacccatgaactgaaaagcccgctggcggccatccgcggcgcggcggagatcctgcgcgaagggccgccgcctgaggtggcggcgcggtttactgataatatcctcgcgcaaaacacccggatgcaactgctggtggagcggctgctccagcaggcgagactggaaagccggctggagataaagcagcagccggtgtcgatagatgcgctataccaacggctgacggaggagcgcaacatcgctctggcggcgaaagctatcaccctgcgctggcgggagagtgggatgctggtcaatggcgatggcgagctgctggcccaggcgctgggtaatctgctcgacaacgcgattgactttaccccccagggcggtgagatcgccctggctgcggagaagcgaaatgaagaggtgcaattgagcgttatcgacaacgggtgcggtattccggactatgccctggaacgaatctttgagcgattctattcgctgccgcgcgaagacggccataagagcagcggccttgggctggcgttcgttcgtgaagtcgcgcgcctgcatcacggcgatatcaatctgcacaatcggcccgaaggcggcgtggtcgccacgctgcgacttcaccgtcccttcacatagcttcaaattctccccacacagccgtcctattgtgaggccatcacgatagggagaaaggctatgttgaaatcaccgttattctggaaaatcaccacgttaataggctgtattgtgctgctatctttgccgttaatgatggtcagggagcttattaatgagcgagcggattatcgtagcgaagtggtggacgccattgagcaaagcaccagcggctcgcaaaaactcgccggaccgctgatcgctattccgataaccgagaccctgacccgcatggagaaccaaaaagaggtcaactatcagcggagctgggtgtattactggctgccggagtcgctggcggtcgccggcaaacagaccgtggagtcgaggagggtgggtatctacagcggccaggtctggcataacgccttgcagattaaggcctcgtttgatccgctgcgtctggcggcgctgagaaaaacgaatatcgtcttaggccagccgcggctggtggtgagcgtcggcgatgcccgcggcattggcgccatccatgccccggaggtcaacggtaacgtattaagcgtggagccggggctggggataagcggcgatggcgcaggtattcatatgccaatgcctgcgctggcggaggacaacaagccgcttgagattgccttttcactcgatctgaacgggacgggagagttttcactggtgccgctcgggcgtaacagcgagctgcagctgaccagtaactggccgcatcccggttttctcggcagcttcctgccaacgcaacgggaagtgagtgctgccggctatcgcgcccactggcaaagcagctggttcgccaacgatatggggagctatttcaaggatgatatggagatcccgtggtcgcgactgccggcgttcagtgccgatgtgatgtcccttgccgaccagtaccagctaaccgatcgggcgacaaaatatgccatcctgttaatcgggctgacctttatggcttttttcgtgttcgagagcctgacctgtcgtcccctgcatccgatgcaatatctgctggtgggcttatcgctggtgctgttttacctggtgctgctggcgctctcagagcacattggttttaccgccgcctggctggcggccagcctgtctggcgcggtgatgaatgggatctaccttcaggcagtgctcagaggatggcgtaacagcctgctgtttgtcgccgcgctactgctgctggatggcgtgatgtggtttctgttgcattctgaggatagcgcgctgctgctgggtaccggggtgctggcgctggcgctgagcgtcctgatgtttttgacccgtcgcgtggactggtatgcgttatcgctgccgaaaggcacagtgcctccgacaccggctgccgatgacgataagctgcgtctctggaaagagtgacggcataaaaaacggcgcccctggggcgccgttttcgcatcatggctgcggaataaatcgtattattcctgcagatcgccacagaaacggtagccttcaccgtgaatggtagcgatgatttccggggtatccggagtggattcgaagtgtttacgaatccgacgaatggtcacgtcaacggtacggtcatgcggcttcagctcgcgaccggtcatttttttcagcagctcggcacgagactgaattttgcctgggttttcgcagaagtgcagcatcgcgcggaattcactgcgcggcagcttgtactgttcgccgttcgggctaaccagggaacggctgttgatatcgagttcccagccgttgaacttgtagctttccacgctgcgacgctcttcgctcacggtaccgaggttcatggtacgggagagcaggttgcgcgcgcggatagtcagttcacgcgggttaaacggtttagtgatatagtcgtcagcgccgatttcgaggccaaggatcttatccacttcgttgtcgcggccggttaagaacatcagcgcgacgtcagcctgctcgcgcagctcgcgcgccagcagaagaccatttttacccggcaggttgatatccatgatcaccaggttgatatcattttcagacaggatctgatgcatttccgcgccatcggtcgcttcgaatacatcgtaaccttctgcttcgaaaatactttttaacgtgttgcgtgttaccaactcgtcttcaacgataagaatgtgcggggtctgcatgtttgctacctaaattgccaactaaatcgaaacaggaagtaccaaagtccctgacctgcctgctgcatgtcgcaaattaacatgcgcggcgtaacatgactaaagtacgtaattgcgttcttgatgcactttccatcaacgtcaacaacatcattagcttggtcgtgggtactttccctctggacccgacggtgtcaaaaacggctgacatcctaaccattttaacagcaacataacaggctaagagaggccgaacacccaataaaactacgcttcgttgacatatatcaagttcaattgtagcacgttaacagtcttgtgaaatcattgcatcgccatgctctttatagtcacaatctttacccggctcaactagttgcgtggataaattaataaatacagtgaatccaaagcctgaaacgatgcatcagatgaaattgcattgcccatcatatggataaatgggttctgttaacatactccttgtcacggcctcctgagaacagtttagatttttttatgggtaagaaaacgcaattttagtgatttttgttgcaaatttgtaaattttcaccgcgtaaaatggggggcgctgcgcctcgataacgcctgagagagagaaagaaaccgcaatgcgtttaacgattattttagtcggtcctgcccgggccgagaacgtcggcgctgccgccagggcgatgaaaaccatgggatttcgcgaactacggatcgtcgatagcgaagcccacctggcgcctccggcacgctgggtggcgcatggctcaggcgacatcctcgatggtatcaccacctatcccacccttgccgaggcgctgcatgacgttgattttaccgtcgccaccaccgcccgcagccgcgcgcgttttcactattacgccacgccgcagcagctgttgccgctgctggaggagaaggcgcagtggatgaaccatactgccctggtatttggtcgtgaggacgccggattgaccaatgaggagctggcgttggctgatgtgttgaccggtgtgccgatggctgcggattatccgtcgctgaatctcggccagtcggtgatggtctactgttatcaattagcatcgctaatgcaacaaacggcgcccgccgccgctgcggcagaccatcatcagctgcaggccttacgtactcgtaccctggcgttactttcgcgtttgggcgtggaggatgatgccaaactggccgactggttgtcgcaacggctgggcctgctgcagcagcgcgacacggcaatgttgcatcgtttgctgcatgatattgaaaaaaacctgccagaataaaactctgtcatattttttatttatggatgtgtatgctgttctatgggctggttttccgccgatctggatgttttttctcacggcagcgggaaaatacgtaagcctgctgaaatggggcaaattgagaaattcattgacttaagacggcagatactttaaccaatataggcaggacatacagacagataaaaatacagagtacacaacatccatgaatcgcatcggcatgattaccaccattatcaccaccaccattaccacaggtaacggtgcgggctgacgcgtacaggaaacacagaaaaaagcccgcacctgaacagtgcgggctttttttttgacaagagatcaaggggtaagaaccatgcgagtgttgaagttcggcggtacatcagtggcaaatgcggaacggtttctgcgggttgccgatattctggagagtaatgccaggcaggggcaggtagcgacggtcctgtctgccccggcgaagatcactaaccacctggtagcgatgattgaaaagaccattggcggccaggatgccctccccaatattgccgacgccgaacgcatttttgccgaacttcttcagggccttgccgacgcccagcccgctttcccgcttgcccagttaaaagccttcatggagcaggaatttgctcagattaagcatgttctgcacggcatcagcctgctgggtcagtgcccggacagcgtcaatgccgcgctgatctgccgcggcgaaaagctctccatcgccatcatggcgggtctgctggaagcccgtggacataaagtcagtgtcattaacccggtcgaaaaactgctcgccgtgggccactatctggaatccaccgtcgatatcgccgaatccacccgccgcattgccgccagccagatcccggcagaccatatgatcctgatggccgggtttaccgccggcaatgagaaaggcgagctggtggtgctggggcgtaacggctccgactactcggctgcggtactggccgcctgcctgcgcgctgactgctgcgaaatctggaccgatgtcgacggagtgtacacctgcgatccgcgtcaggtgccggatgcgcgcctgctgaaatcgatgtcttatcaggaggcgatggagctctcctactttggcgcgaaagtgctgcacccgcgcaccatcgcccctatcgcccagttccaaatcccatgcctgattaaaaataccggcaacccacaggcgccgggaacgcttatcggcgccagccgcgacgaggacgatttgccggtgaaaggcatctctaacctcaacaacatggcgatgttcaacgtctccgggccggggatgaaagggatggtcggcatggcggcccgcgtcttcgccaccatgtcccgcgctggcatctcggtggtgttgatcactcaatcttcttcggagtacagcatcagtttctgcgtgccgcagagcgactgcgcacgtgccaaacgggcgatggaagatgagttttatctggagctgaaagaggggctgctggagccgctggcgattatggagcgtctggcgatcatctccgtggtgggcgacggaatgcgtaccctgcgcggtatctcggcgaaattctttgcggcactggcccgcgccaatatcaatatcgtggcgattgcccagggctcttccgagcgctcaatttcggtagtggtcagcaatgacgacgccaccaccggcgtgcgcgtgacccatcagatgctgttcaacaccgaccaggtgattgaagtgtttgtcatcggcgtcggcggcgtcggcggcgcgctgctagagcagatcaagcgccagcaggggtggctgaagaacaaacatatcgatctgcgcgtctgcggtgtagccaattctcaggcgctgctgaccagcgtgcatggcctgaatctggaaaactggagtgcggaactggcggaggcgaaagagccgtttaatcttggccgcctgatccgcctggtgaaagagtaccacctgctcaatccggtgatcgtcgactgtacctccagccaggcggtcgccgatcagtatgccgacttcctgcgcgaaggtttccatgttgtgacgccgaacaaaaaggccaatacctcttcgctggattactatcaccagctgcgccatgcggccagcagctcgcggcgtaagttcctctatgacactaacgttggcgcgggcctgccggtgattgagaacctgcagaacctgctcaacgccggcgatgagctgcgccatttctccgggatcctgtccggctccctgtcgtttatcttcggcaagctggacgagggggtgagtttctccgcggcgacggcgatggcccgtgagatggggtataccgagccggatccgcgcgacgatttatccggggtggatgtggcgcgtaaactgctgattctggcccgcgagaccgggcgtgaactggagctggcggacattatcgtcgagtcggcgctgccgccggacttcgacgccagcggcgatgtcgagacctttatggcccgcctgccgtcgctggatgatggttttgcctcgcgggttgctaaggcgcgcgatgaaggtaaagtcttgcgctacgtcggtaacatcgaagaggatggtacctgccgggtaaaaatagccgcggttgacggcaacgatccgctgttcaaagttaagaatggtgagaacgcgctggctttttatagccattattatcagccattgccgctggtgctgcgcggctatggcgccgggaacgacgtcacggcggccggcgtattcgccgacctgctgcgcaccctgtcctggaagttaggagtttaagatggtcaaagtatatgccccggcttccagtgccaatatgagcgtcgggtttgatgtgttgggcgcggcggtcacgccggtcgatggcacgctgcttggcgacaacgtcactgtcgaagcggcggagcaatttagcctgcagaatcttggacgcttcgccagcaaactgccgacggcgccgcaggagaacattgtttaccagtgctgggaaagcttttgccgggagatcggcaagacggtgccggtggcgatgacgctggaaaaaaacatgccgattggctccgggctgggttccagcgcctgctcggtggtcgctgcgctggtggccatgaacgagttctgcggcaagccgctgaacgagacgcgcatgctggcgctgatgggagagatggaagggcgtatctccggcagcattcactacgacaacgtggcgccgtgctatcttggcggcatgcagttgatgatcgaagagaatgggattatcagtcagcaggtgcccgggtttgatgagtggctgtgggtgctggcctatccggggattaaagtctctactgctgaagcgcgggcgattctgccggcgcagtatcgccgccaggattgtatcgcccatggtcgccacctcgcgggctttattcacgcctgctacacccgccagccgcagctggcggcaaaattgatgaaagatgtgattgccgaaccgtaccgaaccaaactgctgccgggctttagcgaagcgcgtcaggcggccatggagatgggcgcccaggcttgcggcatctccggctctggcccaacgctgttcgcgttgtgtgataaaccggataccgcgcagcgcgtcgccgactggcttggcgcgcactatctgcagaatcaggaaggctttgttcatatttgccggctggacacggcgggcgcacgcgtagtgggataaccaatgaaactgtataacttaaaagatcataacgagcaggtcagctttgcgcaggccgtcacccagggacttggcaagcatcagggcctgttctttccgcacgatctgccggaattcagcctgactgaaatcgacgacatgctggcgcaggactttgtcacccgtagcgccaaaattctatccgcctttatcggcgatgagatcccgcaggatgtcctgcagcagcgggtgcgcgcggcgtttgcgtttccggcgccggtaagcaaggttcaggaagatgtcggctgtctggagttgttccatggccctacgctggcgttcaaggatttcggcggccgctttatggcgcagatgctgacccacatcgcaggcgataagccggtcaccatcctcaccgcgacctctggcgacaccggggcggcggtggcgcatgctttctacggcctgccgaacgtcaaggtagtgatcctctatccgcgcggcaagatcagtccgctgcaggagaagctgttctgtaccctcggcggcaatattgaaaccgtggcgattgatggcgactttgatgcctgccaggcgctggtgaagcaggcgtttgacgatgaagagctgaaggcgacgctgggtctcaactcggctaactccatcaacatcagccgcctgctggcgcagatctgttactatttcgaagcggcggcgcagctgccgcaggaagcccgcaatcagctggtgatttccgtgccgagcggcaacttcggcgatctgaccgccggtctgctggccaagtcgctggggctgccgatcaagcgctttatcgccgccaccaacgccaacgacaccgttccgcgctatctgcagggcggcgagtgggcgccaaaagccacccaggcgacgctgtccaacgccatggacgtcagccagccgaacaactggccgcgcgttgaagagctgttccgccgtaaaatctggcgtctcagcgagctgggctatgccgcggtcgatgatgagaccaccaaagcagcgatgcgcgagctgaaggccatcggctacatctctgaaccgcatgcggcgattgcctggcgcgcgctgcgcgatcagctgcagccgggagagtacggcctgttcctcggcaccgcccatccggcgaagttcaaagagagcgtggaggagatcctgcaggagactctgccgctgccgaaggagctggccgaccgcgccgacctgccgctgctgtctcacaacctgccggcggatttcgccgcgctgcgtaagctgatgatgggctaagccaggcaataatatcggcaacatgatcgaccaaaccgggcagctattgcccggtttttatatttaacgcacttttccatatcagtaaaatttctctccataaaattccccacactattttattgtcagcgcactgcttttattgcaaactcttttacggattgtcctctttgccggataattccactggattatcttttttatttattatttcatgctgcttatatttatgctgctgattttattatgaagcagctatagatatcatttgttatagatgcattgttaatgcacaaggttttcaaggaggaaacatgcgtattttatctctttttttggtggtgttcgctttaacaggctgctccgggacaacgattggcggtaatgaagataaattaacgccagcctatctgaaacaacatctcattgtcggaaaaaccaccaaggccgaggttcgtcagtattttggtgctccggattctggtcatacgacggtgacggcgtcgggtaaagagagctggtattattcagtagataaagggatcaacctggtcagcctcgcgggttccatgatcccggtaaccggggcatcgcaagctgccgatgcggtcgataagtccagccaaaaagattcgaactcgctgatgattttcttcgatgaaaaaggcgtggtggaaaactgggtgcgttaaaataagtaataatctgcttaattatattgaaaaggggaataactccccttttttattaccgtaacgtgttactgctcgtggcgtttaaacaccagttcgcctttctctgaggcatccgcatcaaagaaatagccttcgctattaaaggctttgagctgctccggctgggttaagcggttttcaataatgtagcgactcatcaggccgcgggctttcttcgcataaaaactgatcactttgaatttgccgttcttctcatcgaggaataccggcttgatcagctgaccctgcaattttggcgttttcaccgatttaaaatattcatcggaagccaggttgatgacgatatcgtcgccctggtcgcgcagcgcctgattcagcttctcggtaatggtatccccccagaactggtacagatctttgccgcgcggattttccagacggatccccatctccaggcggtagggctgcatcaggtctaacgggcgcagcacgccatacagcccggagagcatgcgcagatgctgctgggcgaagtcaaagtcgtcctcggtgagcgtctctgcctgcaggccagtgtagacatcgcctttaaaggcgaggatcgcctggcgggcgttttgcggcgtaaagtcagggtgccagtcgtggaagcgggtggcgtttagatccgccagcttgtcactaatgctcatcagcttgccgatttgcggtgcgctcagcttacgggcgatgccgataagctgctgagaatactcgaggagttcgggctgggtatagcgagtcgttgccagcgggctttgataatcgagcgttttagcaggtgaaatcagaatcagcatatccagtccttgcaggtaatttcgacgaattttaacaaaaaaagtgcatggtgggatcgatagctgcaattgccgcgctattcgcgcggcaattcattccaggcgcccggggccagctgttggtcaatatccgggtaacgagtggcatcgaaagtcggctggatacccagccgccgctgacgcagataatcgctggcgataatccgcaccgtcggggagagcagcagaatggccgtcaggttggtcatcgccatcagcgccatgatgatatccgcgctctgccagacgacaggcaggctaaccatggtccccaacagcaccatcaggacggtgagtattcgcagcccccagatatagcggggcttatccaggcgcaggaagaccagattattttccgcgtacacgtaattggctacgatagagctaaaggcgaacagcagcacgatgagggcgataaaacccgctccccagccgccgaccagcacgctcatcgcgtgttgcaagtcctgaataccgttgagcgtatattcattgtcgggccgcggcgccagcatgacgataatcgcgcttgcggtacagatcacgatagtatcgataaacacgccaatcatctgcacgatcccctgcgccgccgggtgcggcggccaggaggcggcggccgcggcggcgttaggcgaagagcccatccctgcttcattggagaacatgccgcgctggaagccgctggtcagcgcctggctgatggtgtagcccaccgcgccggcggcggcctcctgccagccgaaggcgcagcgaaagatggtggcgaaaatcgtcggcagggcggtgatgtgccacaggccgatgagcaggctggtggcgatccacaacagcgccataaagggaacgatccattgcatcagacgcgccacgccgcgtaaaccacggaggatcgccagcaaaacgacaacggccagcacgccgccgctgaccgccgccggcagatcgaacgcatagcgcaaggcatgggccacggagttagcctgcacggtattgaagataaaaccataggccagcaggaggaggatcgaaaacaggacgcccatccaacgcatgccgagcccgcgcgccatgtaccaggcagggccaccgcgaaactgtccgcggctatcgcgttctttatacagctgagcaagggaacattcagcaaagctgctggccatgccgagcagggcggaaacccacatccagaatacggcgccgggcccaccggcgtcgatcgccagcgtcaccccggcaagattgccgctgccgacccgggcggcaaggctggtacagagcgcctgaaaggacgttaaaccacccggctgcgggtgcaggcttttttttagactgcggccgaatttgcgcacgtaacgaaactgaataccccgggtttgccagctaaaccagataccggcgcccagtagcagataaatcatcactgagccccagagtatttcattgataaatgagagaaaatcaggcattaaacatcctcttgtccatgccggtacgccagtgtaagcgttaccaattaagtgacaatcctttcgctttcagcaaattaatctgcatagtttatcacactctgcgctcttctctcgtcggcggttgcgctgacccggcagcgtgttatcatctgggcagaccggttacatccccttaactgctgtttaagagaaatatatcatgacggataaattaacttctctgcgtcagtacaccactgtcgtcgctgacaccggagatattgcggcaatgaagctgtatcagcctcaggatgccaccactaacccttccctgattctcggcgcggctcagatccctgagtaccgtaagctgattgacgacgctgtcgcctgggctcgtagccagagcagcgatcgcgcgcagcagatcctcgatgcttccgataagctggcggtgaacatcggtctcgaaattctgaaactgatcccgggccgtatctccaccgaagtggacgcacgtctctcctatgacaccgaagcgtctatcgcgaaagccaagcgcatcatcaagctgtacaacgacgcgggcatcagcaacgatcgcattctgatcaaactggcctccacctggcagggcattcgcgccgctgaacagctggaaaaagaaggcattaactgtaacctgacgctgctgttctccttcgctcaggctcgcgcttgcgccgaagcgggcgtcttcctgatttcgccgttcgttggccgtatcctcgactggtacaaagccaacaccgacaagaaagagtacgcaccggcagaagatccgggcgtggtttccgtcagcgaaatctacgagtattacaagcagcacggctatgaaaccgtcgtgatgggcgcaagcttccgtaacgttggcgaaattctggaactggctggctgtgaccgcctgaccatcgccccggcgctgctgaaagagctgtccgaaagcgaaggcgccgttgagcgtaagctggtatataccggtgaagtgaaagcgcgtccggagcgtattaccgaatctgagttcctgtggcagcataaccaggatccgatggcggtagacaaactggcggaaggtatccgtaagtttgcgatcgaccaggaaaaactggaaaaaatgatcgacgaactgctgtaatcgcgcaggtggccgacgcccgtcggccacattacactgtctgtcccgcctccggcagtgtatcatttcgtttaacgccacagtttgaacggaataaccatgaataccttacgaatcggcttagtttccatttccgatcgcgcctccagcggcgtctatcaggacaaaggcatcccggcactggaagagtggctggcacgtgccctgaccacccctttcgagctgcaaacccgtctgattccggatgagcaggccatcattgagcaaacgctgtgcgaactggttgacgaaatggggtgccatctggtgctgaccaccggcggaaccggccctgcgcgtcgcgatgtgacgcccgacgcaacgctggcgatcgccgatcgcgagatgccgggcttcggcgagcaaatgcgccaggttagcctacactttgtgccgacggctatcctttcccggcaggtcggtgtgatccgcaagcaggcgctgatcctcaaccttcccgggcaaccgaaagcaattcaggagactctggaaggggtgaaagatgctgacggcaacgtgctggtgcacggtattttcgcaagtgtaccttattgtgtacagttgcttgaagggccttatgtggaaaccgatggccgtatagtagaagcttttcgtcccaagagtgccagacgcgaaactttatcctgaatttgatgcatttttgatataacctgcatcgctaatggtgtgccgttttatttacgatatagtgatttttactttacacactataaaacacgctgcacacctcaggatgaaattgcgttatgtcatatgcaaaccgaccgctcaaccgccaggattataaaacgctgacgctggccgccctgggcggcgcgctggagttttatgactttatcattttcgttttcttcgccgccgtcgtcggcgagctcttctttcccgcagatattcccgaatggctgcgccaggtgcaaacttttggcattttcgccgccggttacctggcgcgtccgctggggggcatcatcatggcccactttggcgatctggtggggcgcaagaaaatgttcaccctcagcatcctgctgatggcgctgccaaccctggcgatcggtctgctaccgacctatagctcggtaggtatcatcgccccgctgctattgctgctgatgcgtattctgcagggagcggcgatcggcggtgaagttccaggcgcctgggtgtttgtcgctgagcatgtcccggaaaaacgcattggtatcgcctgcggcacgctgacggccggcctgacggttggcattctgctggggtcggtggtggccacgcttatcaataccagtctgacgccgcaggggatccacgacggcggctggcggatccccttcctgctgggcggcgtatttggtctgatagcgatgtatctgcgccgctggctgcaggagacgccgatttttcttgagatgcagcagcgcaaagcgctggcgcaggagctgccggtaaaagcggtggcgctcaagcaccagaaggcggtggtgatctctatgctgctgacctggctgctgtcggctggcgtggtggtggtgatcctgatgtcgccggtctggctgcagaagcactatggttttgcgccggccattaccctgcaggccaacagcatcgccaccattatgttgtgcatcggctgtctgctcgccgggctggcggcggaccgcttcggcgccagccgcacttttatcgtcggcagcctgctgctggcggttgccagctgggcattttaccatcttgccggcgccagcccgcagcggctgtttctgctctacggtacggtggggctttgcgtcggcgtggtgggggcggtgccctatgtgatggtgcgggccttcccggcggaagtacgcttcaccggcatctctttctcctacaacctgtcgtacgcgatctttggcggcctgacgccgattgcggtcaccatgctgatgggggtgtcgccgatggcgccggcctggtatgtgctggccctgtcgctgatggggctgggattaggtatctggctgcgtcaggagctgacggcgccgacggggatgccggaaggggagctgcagcgttaacgatggctagctgatgctgataatgacctgccgccgccctgtgaccggacggcggcggaagattagcgcggttcgccgatcggcagcacggtgcggccgaactgttcgttcagcacttcacccatcgccaggtaaatagcgctggcgccacaaaccaggccgacccagccggctaccttcacaatgccttcgttatcggccaaatggccaatcgccagcagcgcgaacagtacggtcaggctcaggaagacaaactgcagcatgcgggctgccttcagggtgccaaagaacataaacagggtaaagacgccccacaggccgaggtacataccgaggaagtgcgcgtttggcgcgtctgccaggcccattttcggcatcagaagaatcgccaccagcgtcagccagaagctgccgtaggaggtaaaagcggttaagccaaaagtgttgccttttttgtattccagcaggccggcaaaaatttgcgcaatgccgccgtaaaaaatgcccatcgccaggatagctacatcgaatgcgaacaggccgctattcgccaggttaagcagaatagtggtcatgccgaagcccataaggcccagcggtgccggattagccaacttagtgttgcccataattcctcaaaattatcattaaaagggaagcattaccccgcgacttggcggcggggcgcggcataataatgaggcgctgatgggctgtctatgatctggcggggtatttttcaccaatttccgcggtgtctgacggcggctggagcatttgccgtaaacaggcaatatgcaggaccgcggggatggtgacccggtaggcgctgccgctcaccgctttcacgctgttcagcgcggcgccgagcggtccgcccagcccggcgccgcgcaccaggccatgaccgatgacgctcaccgcggcgtgcgtgcgcaggatggcggttaagcgttcgtccagcaacaaagtgacgccttcgcttagcttgcgatgcctcagcagatgagccatcaggctgtccagctcatggctccggcactccaccgcggcgagaaagtgcgctttttgctccgcgttcagtttattccagctgtgctgcagaaaatgcgccagcaactgctgctcgatctgcggcgtcgacagctgtttgtcgaccttcgctttcagtcgtttacatacatccagcaggatcgcgcgataaaatttgccatggcggcgcagcgtgttggcgatgctatcgccgccaaaatgctgtagctcaccggcgattagctgccagttgcggcgataacgctccgggtgaccctccatcgctaaaaatgtctcgttgcgcaggagcgtgctggagagacggggtttgccattttccccgtgggtcagaatgcgggtaaaggcttccagatgcgcctcgctgcactcaggcagaaaggcgagatcgtcatcctccaggtaattaatatgcataacgttttctctcgggcaggggcgacattagtcatcgccgataattttcagtgatgccatatctgaggagtgcaccgtgtggccggagaaggcgatcttcttcacgcaacgtttgttgtcgttatcgctattgattttgatccagccggtggtgctgccctctttgatcccggcggggacgttcagcgtgtggctggcgccgcggctggtcttaaagtagaccgtcgccccggagagttgtacatcgccgcggtcggcgctgagctgaatgcgtttgaccacccggcagacgggaagcgtcagcgtcaggtcgttggtttcattgcgcggcatagctatcacgccgagaattttatggtcgttagcggccgccgaggtgataaatgacacgccgaggataagccctacggaaagccggtatagcgatttcattaatttgtcccctgaataagcgaagtgcgatggcgggggagtttatcactgcgaaaacggggcttttagcgcgcaagtattgcgggttatgtcaatgatattatgaatgtatttcctattttaatccgttttttgtatgtatatttcgccgtcgtttttgccatccaacaaccttgttcggcaagtcatccgtaaccctgtgcgaatccgaggcaaaaaatttttatgcttgccccttgatgccggagtgggcgaccccatcttgtagtcaaccgcagtgaagaacctgaaaaaaaatgatgtctgggcagttgaaaccgcacgtttcgcccttattacaggttcacaaccacatgttgatcgaatttttagtggagacgtttagatgggtaaaattattggtatcgacctgggtactaccaactcttgtgtagcgattatggatggcactactgcacgcgtgctggagaacgccgaaggcgatcgcaccacgccttctatcattgcctatacccaggatggtgaaactctggttggtcagccggctaaacgtcaggcagtgacaaacccgcaaaacaccctgtttgcgattaaacgcctgattggccgccgcttccaggacgaagaagttcagcgtgacgtttctatcatgccatacaaaattgttgccgcagacaatggcgacgcatggctggatgtgaaaggcaccaaaactgcaccgccgcagatctctgctgaagtgctgaagaaaatgaagaaaacggctgaagattacctgggtgaaccggtaactgaagcggttatcaccgtaccggcttacttcaacgatgcgcagcgtcaggcaaccaaagatgccggccgtatcgccggtctggaagtcaaacgtatcatcaacgaaccaaccgcggccgcgctggcttacggtctggataaagaagtgggcaaccgtactatcgcggtttacgacctcggtggtggtactttcgatatctcgattatcgaaatcgacgaagttgatggcgaaaaaacctttgaagttctggcgaccaacggtgatacccacctgggcggcgaagacttcgatactcgtctgatcaactacctcgttgatgagttcaagaaagatcagggcattgacctgcgcaacgacccgctggccatgcagcgcctgaaagaagccgctgagaaagcgaagattgaactgtcttctgctcagcagaccgacgttaacctgccgtacatcactgcagacgcgaccggtccgaaacacatgaacatcaaagtgactcgcgcgaaactggaaagcctggtagaagacctggttaaccgttccatcgagccgctgaaagtcgctctgcaggatgccggtctgtccgtttccgatatcaacgacgtgatcctcgttggtggtcagactcgtatgccgatggtgcagaagaaagtggccgagttctttggtaaagaaccgcgtaaagacgttaacccggatgaagccgtggcgatcggtgctgccgttcagggcggtgtactgactggcgatgtgaaagacgttctgctgctcgacgtaaccccgctgtcgctgggtatcgaaaccatgggcggcgtgatgactgcgcttatcagcaaaaacaccaccatcccgaccaagcacagccaggtgttctctaccgctgaagacaaccagtctgcggtaaccatccatgtgctgcagggtgagcgtaaacgcgcgtctgataacaaatctctgggtcagttcaacctggatggtattaacccggcgccgcgcggcatgccgcagatcgaagtgaccttcgacatcgatgctgacggtatcctgcacgtctccgcgaaagacaaaaacagcggtaaagagcagaagatcaccatcaaagcgtcttccggtctgaatgaagaagaaattcagaaaatggttcgcgaagcagaagctaacgccgaatctgaccgtaagttcgaagagctggtccagacccgcaaccagggcgaccatctgctgcacagcactcgtaagcaggttgaagaagcaggcgataaactgccggctgacgacaaaactgccattgagtctgcgctgaccgcgctggaatcttctctgaaaggcgaagacaaagcggatatcgaagcgaaaatgcaggcgctggcgcaggcttctcagaagctgatggaaattgctcagcagcagcacgctcagcagcaggcgggttccgctgacgctcaggcgagcaacgcgaaagacgacgatgttgtcgacgctgagttcgaagaagtgaaagataaaaaataatcgccctttgaacgggtaaaacactggcacgggcgaagaggtttcctctccgcccgtgcacgcatgttaaggggctgaaaaacaccgatggcaaagcaagattactacgagattttaggcgtttccaaaacagcggaagagcgtgaaatcaaaaaggcttataagcgcctggccatgaaatatcacccggaccgcaaccagggtgataaagaggctgaagccaaatttaaagaaatcaaagaagcgtatgaaatcctgactgatgcccagaagcgtgcggcctacgatcagtacggccacgcggccttcgaacagggcggcatgggcggcggcggcggttttggcggcggtgccgacttcagcgatatctttggcgatgttttcggcgatatctttggcggcggacgtggtcgtcagcgcgcggcacgcggcgccgatctccgttacaacatggagctgacgctggaagaagcggtgcgcggcgtcactaaagagatccgtattccgacgctggaagagtgcgacgtctgccacggcagcggcgccaaggccggcagcaaaccgcagacctgtccgacctgtcatggcgcaggccaggtgcagatgcgccagggcttttttgcggtacagcagacctgtccgcactgccagggacgcggtacgctgattaaagatccgtgcaataaatgtcatggccatggccgcgtagaaaagatcaaaaccctgtcggttaaaattccggcgggcgtggataccggtgaccggatccgtctggcgggcgaaggcgaggccggcgaacatggcgcgccggcaggcgatctgtacgttcaggttcaggtgaagcagcacgctatctttgagcgtgaaggcaataacctgtactgcgaagttccgatcaacttcaccatggcggcgctgggcggtgagatcgaggtcccaacgctcgacggccgcgtgaacctgaaaattccaggtgaaacccagaccggcaagctgttccgcatgcgtggaaaaggcgtgaaatccgttcgcggcggcgcgcagggcgatctgctgtgccgcgtggtggtggagacgccggtggggctgaatgagaagcagaagcagctgctgaaagagttgcaggagagcttcggcggtccgaccggggaaaacaacagcccgcgttcgaaaagcttctttgacggcgtgaagaagttcttcgacgacctgacccgctaattccgcctttgttgatatccggcccgggcctttgctgcccgggctttttttcgccttagaactcccctttaactcgtaaaaagcgaatattagcgcaacttaaatctgattttttcgagttatcagtgtgtgtattatgcttttatcgagttattcaccaacaggatgaaagtaaaagtgaaacatctgcaacgattctttagtagcgatgcttccggcggcattgtcttaattatcgccgccgcgctggcgatggtgatggccaataccagcgtgaccagcggtctgtatcactccttccttgagacgccagtacagctgcgtgtgggcacgctggagatcaacaagaacatgctgttatggatcaatgatgccctgatggcggtgttctttttgctgattggcctggaggtcaagcgtgagctgattcaggggtcgctggcgagccgccgtcaggcggtcttcccggtgatagccgcgctgggcgggatgatcgtcccggcgctggtctacctggcttttaacgcccaggatcctgtcgccagagagggatgggcgatcccggcggcgacggatattgcctttgccctcggcgtgctggcgctgttaggtagccgggtcccgacggcgctgaagattttcctgatggcgctggcgattattgatgacctcggggctatcgtgattatcgcgctgttttatacccacgacctgtccatgctctcgctgggcgtggcggcggcggcgatcgcggtgctggtggccctgaatctgagcggcgtgcggcgtaccgggatctatattctggttggcgcggtgctgtggacggcggtgctgaagtctggcgttcacgcgacccttgccggggtgattgtcggctttatgatcccgctcgaagaaaagcatggcaagtcgccggccaaagcgcttgagcatgtcctgcacccgtgggtggcgtttatgatcctgccgctgtttgccttcgcgaacgcggggtctcactgcagggggtcacccttgccgggctgacgtcgctcctgccgctgggcattatggctggcctgtttatcggtaagccgctggggattagcctgttctgctggctggccctgaagctgaagtgggcttcgctgccggagggaaccacctgcaagcaaattatggcggtggggatcctgtgcgggattggctttacgatgtcgattttcatcgccaccctggcctttggcagcgtggatcccgcgttgatcaactgggccaagcttggcattctgatcggctcagtgctatcagcggtcgtcggctacctcatactgcgtcagcgcgtgacggatactcgcctcgcggtataacctttctgcaggagagcccgtcaggctctcctggacattatcagggagagaagcatgtcacatattaactacaatcatctgtactacttctggcacgtgtataaagaagggtccgtcgtgggcgcggcggaggcgctgtttctgacgccgcagaccattaccgggcagatcaaagccctggaggagcgcctgcaggggaaattatttaagcgaaaggggagggggcttgagccgagcgagctgggggagctggtttttcgctatgccgaccggatgtttaccctcagccaggagatgctcgacatcgtcaactatcgcaaagagtcgaacctgctgtttgacgtcggcgtggccgatgcgctctcgaaacggctggtcagcggcgtgctggatgccgccgtcgttgagagcgagcagattcatctgcgctgttttgaatccactcatgagctgctgctggagcagctgagccagcataagctcgacatgattatctctgactgcccgatcgactcgacgcagcaggaagggctattttcggtgaagatcggcgagtgcagcgtcagcttctggtgcatgaatccggcgccgacgaagccgttcccggcctgcctcgaagagcggcggctgctgatccccggccggcgatcgatgctgggacgtaagctgttgaactggattaacgtgcagggcctgaaggtggagatcctcggcgagtttgacgacgcggcgctcatgaaagccttcggcgccgcacataatgcgatatttgtcgcgccgacgctctacgcgcatgatttctaccatgatgaatcgattgtcgaaattggccgtatggatagcgtgatggaggagtatcacgctattttcgctgaaagaatgattcagcacccggcggtacagcgtatctgtaatcgcgattattcgtcgctgttcaccgaaccccgatagccggaaggcgtgggctggcgtggctcagatcgcgccagcgtgcgctaccgggggaagatggtaggcataaaaaaacccgctttcgcgggtttctttaacaaagttcagcaagcaggcgattaagccagtttgttgatctgtgcagtcaggtttgctttatgacgcgcagctttgtttttgtggatcagacctttagcagcctgacggtccacgatcggttgcatttcgttaaatgctttctgtgcagcagctttgtcgccagcttcgatagctgcgtatactttcttgatgaaagtacgcatcatagagcgacggcttgcgttgtgcttgcgagccttttcagactgaacggcgcgcttcttagctgatttgatattagccaaggtccaactcccaaatgtgttctatatggacaattcaaaggccgaggaatatgcccgtttagccttcttttgtcaatggatttgtgcaaataagcgccgtttaacaccacagcgcttcattacgtagtgatggcgcaagattctaccagcttgttgcaggcgaatacagcttttccaccataaaaatcgccgggcgcggccagttttcacgctttctcgcgctgagtgaatgaattcctgagaactttcgttgccgaggtgcaatcgctggttaacgttgacagttgtacaaggtatactcggacgattttcactgttttgagccagacatgaagctgatacgcggcatacataatctcagtcaggccccgcacgggtgcgtgctgaccattggtaatttcgacggcgtgcatcgtgggcatcaggcgctgctgcagcggttgcgcgaagagggccgccagcgcggtttaccggtcgtggtgatgatttttgaaccccagccgctggagctctttgccgctgataaagccccggcgcgattgacccgcctgcgtgaaaagctgggctatctggctgaaagcggggttgactatgtattgtgcgttcgctttgaccgccggttcgccgcgctaaccgcgcaggattttatcagtgaactgctggtgcgtcgcctgggcgtgcagttcctcgccgttggtgacgatttccgctttggcgctggtcgccagggggatttcttgttattacaaaaagcgggggcggaatatggcttcgacgtcaccagcacccagaccttctgcgaaggcggggtgcgaatcagcagcacggcggtacgccaggcgctggccgatgacgatctcctgctggcggagacgctgctcggccatccgtttagcatctccggacgcgtcgtgcatggtgatgaactaggccgaaccataggttttccgacggcgaacttaccgctgcgtcgtcaggtttccccggttaaaggggtctatgcggtagaagtgacagggctgggcgacaaaccgatagcgggcgtcgccaatattggcacccgtccaacggttgcgggcgtgcgtcagcagctcgaagtacatctgttggacgttgtaatggacctctacggtcgccatatcaatgtaatactgcgtaaaaagatacgtaacgagcagcggtttgcgtcgctggacgagctgaaggcgcaaatcgcacgtgatgagttaacggcccgcgaattatttgggctgaccagccaggcctgagccactggtgtttatcaaaccgaaatacggaaccgagaatctgatgagtgactataaatcgaccctgaatttgccggaaacagggttccctatgcgtggcgacctcgccaaacgcgaaccgggaatgctggcgcgttggaccgatgatgacctgtacggcatcattcgtgcagccaaaaaaggcaaaaaaaccttcattctgcatgatggccctccttatgcgaatggcagcattcatattggtcactcggtaaacaagattctgaaagatattatcgttaagtccaaaggactgacgggctatgactcgccttacgttccgggctgggactgccacggtctgccgatcgagctgaaagtggagcaggaatacggcaagccgggtgagaaatttaccgctgccgaattccgcgctaagtgccgcgaatatgccgccgagcagatcgatggccagcgtaaagactttatccgtctcggcgtgctgggcgactggtcgcatccgtacctgaccatggacttcaaaaccgaagccaacatcatccgcgcgctgggcaaaatcatcggtaatggccacctgcataaaggcgccaaaccggtgcactggtgcgtagactgccgttccgcgctggcggaagcggaagtggagtattacgacaaaacctctccgtctatcgatgtcgcgttccacgcggtagacaaagccgcggtactggcgaaattcggcgtagtcgacgtcaacggtccggtgtcgctggttatctggaccaccacgccgtggaccctgccggccaaccgcgctatctctctgtctcctgagttcgactatgcgctggtgcaggttgacggccaggcgctgatcctggcgaaagacctggttgagagcgtaatgaagcgcgttggcgcgacggactacactattctggcggcggtacaaggttctgagcttgagctgatgcgctttaagcatccgttcctcgatttcgacgtgccggcgatccttggcgaccacgtaacgctggatgccggtaccggtgcggtgcataccgctggcggccacggtccggacgactacaccatcagccagaaatacggtctggaaatcgccaacccggttggcccggacggcgcttacctgcctggcacctggccgtccctggacggcattaatgttttcaaagccaatgacatcatcgttgagatgctgcgtgagcgtggcgcgctgttacacgttgagaaactgcagcacagctatccatgctgctggcgccacaagtcgccgatcatcttccgcgccactccgcagtggttcgtgagcatggatcagaaaggcctgcgcgcgcagtcgctgaaagagatcaaaggcgtgcagtggatcccggactggggccaggcgcgtatcgaatcgatggtcgctaaccgccctgactggtgtatctcccgtcagcgcacctggggcgtgccgatgtcgctgttcgtgcataaagaaacccacgaactgcacccgcgtacccttgaactgatggaagaagtggcaaaacgcgttgaagttgacggcatccaggcgtggtgggatctcgattcccgcgacattcttggcgatgacgccgacagctacgagaaagtgccggataccctcgacgtctggtttgactccgggtcgacccactcttccgtggttgacgtgcgtccggaattcgctggtcacgccgccgatatgtatctggaaggttctgaccagcatcgcggctggttcatgtcctcgctgatgatttccacggcgatgaaaggcaaagcgccatatcgtcaggtactgacccacggcttcaccgtcgacggtcagggccgcaaaatgtccaagtctatcggcaacaccgttagcccgcaggacgtgatgaacaagctcggcgccgatatcctgcgcctgtgggtggcttccaccgactacaccggcgaaatggcggtctctgacgagatcctcaaacgcgctgcggacagctatcgtcgtatccgtaacaccgcgcgcttcctgctggcgaaccttaacggtttcgatccggtgaaagacatggttaaaccggaagagatggtggtgctggaccgctgggcggtcggctgcgcgcaggcggcacagaaagatatcctgaaagcctacgaatcctacgacttccatgaagtggtgcagcgcctgatgcgcttctgctccatcgagatgggctcgttctacctcgacatcatcaaagaccgccagtacaccgccaaggcggacagcgtggcgcgtcgcagctgccagaccgcgctgttccatatcgtggaagcgctggtgcgctggatggcgccgatcatgtccttcaccgcagatgaaatctggggctatctgccgggcgagcgtgagaaatatgtcttcaccggcgagtggtatgaaggtctgttcggcctggccgacgacgaagcgatgaacgacgatttctgggatgagctgctgaaggtgcgtggcgaagtcaacaaggtgatcgagcaggcgcgtgcggataagaaagtcggcggctcgctggaagcggcagtcacgctgtatgctgatgccgatctggcggctaagctcaatgcgctgggcgatgaattgcgatttgtcctgttgacctccggggcgaacgtcgcagactatgcgagcgcgtccgctgatgcgcagcaaagcgaactgctcaaagggttgaaagtcgcattgagtaaagctgaaggtgagaaatgcccgcgctgctggcattacaccaccgatatcggcaaggtggcggaacacgcggaaatctgcggacgctgtgtgagcaacgtcgccggtgacggcgagcaacgtaaattcgcctgatgagtaaatcgatctgttcaacggggctacgctggctgtgggtggtcgtagccgtgctgattatcgatctgggcagcaaattcctgatcctccagtacttcgctctggggagacggttccgctgttcccgtcgcttaatctgcattatgcccgcaactatggcgcggcctttagcttcctcgccgacagcggcggctggcagcgctggttcttttccgggatcgcgatcggcatttgcgtggtgctgacgatgctgatgtaccgttcgaaggcgacgcaaaagctgaacaatattgcctacgcgctgattatcggcggcgcgctgggcaacttgttcgatcgcctgtggcatggctttgtggtcgatatgatcgacttctacgtcggcgactggcattttgccaccttcaacctcgccgatagcgcgatctgcatcggcgcagcgctgattgtgctggaaggcttcctgccgaaaccgactgtgaaagagcaggcgtaaatctcaatgccgggtgacgtgacgcttacccggcctacagaatttttggctcccgtaggcccggtaagcgtaatgccgccgggcaccaggtgacctaaacaagcgagcaatttgcatgtctaaatccgtacagagcaacagcgcggtactggtgcacttcactctgaaactggacgacggctccactgccgagtccacccgcagcaacggcaaaccggcgctgtttcgcctcggcgacacctctttgtctgaagggctggagcaacagcttctcggtttgaaagagggggagaaaaaggccttttcgctggagcctgacgccgcctttggcgtacccagcccggacctgattcagtatttctctcgccgcgagtttatcgacgctggcgagccggagatcggcgcgattatgctctttaccgcaatggatggcagcgaaatgcctggcgtgatccgcgaagtgaacggcgattccatcaccgttgacttcaaccatccgctggccgggcgcactgttcattttgatattgaagtgctggagatcgatccggcgctggaggagtaacatgcagatcctgttggctaacccgcgcggtttttgcgctggcgttgaccgcgctatcagcattgtagaaaacgcgctgacgctgtatggcgcaccgatctatgttcgtcatgaagtggtgcacaaccgctatgtggtggatagcctgcgcaagcgtggcgccatttttatcgaacagatcagcgaagtgccggacggcgcgatcctgattttctccgcccacggcgtgtcgcaggcggtacgcaacgaagcgaagagccgcgacctgacggtgttcgatgctacctgtccgctggtgaccaaagtccatatggaagtcgcccgcgccagccgccgcggcgaagagtcgattctgattggccatgccggccacccggaagtcgaaggcaccatgggacagtacaacaacccgcaaggggggatgtacctggtcgagtcgccggaagacgtgctgaagctggaagtgaaaaatgacgcccggctgtcgtttatgacccagaccacgctctccgtcgacgatacctcggatgtgattgacgccctgcgcgcgcgttttccgaaaatcgtcggcccgcgcaaagacgacatttgctatgccaccactaaccgtcaggaagccgtgcgcgcgctggcggagcaggctgacgtagtgctggtggtcgggtcgaaaaactcctccaactctaaccgcctcgccgaactggcgcagcggatgggcaaagcggcttatctgattgacgacgcctccgatatccaggaagcgtgggtcaaggatgcggcctgcgtcggcgtgacggcgggcgcgtcggcgccggatattctggtgcagaacgtcattacccgcctgcaggagctgggcggcggcgaagccgtgccgctggaaggccgggaagagaatatcgtctttgaagtgccgaaagagctgcgtgtggatgtccgtgaagtagagtaagttctttcctccagcagtatgagaagatgccagacttaacgtctggcatttttttagggagaaaccatgcgcttaccaatcattcttgataccgatccgggcatcgacgatgccgccgccattgccgcggcgctgttcgcgcctgagctggatctgcagttgatgaccaccgtagcgggcaatgtctcggtggagaagacgacccgtaacgcgctgcaattgctgcatttctggaatgccgatgtaccgctggcgcagggcgcgtcgatgccgctggtgcgtccgttgcgcgacgccgcctcggtgcatggcgaatccggcatggaggggtatgactttgttgagcatcaacgtcaaccgctggcgaagccggccttccaggcgatccgtgatgcacttatgcatgctgccgagccgatcaccctggtggcgattggtccgctgaccaatatagcgctactgctgacccagtacccggaatgtgtgtttaatattcgccggctggtgatcatgggcggctcggcgggccgcggcaacttcacgccgaatgcggaattcaatatcgctatcgacccggaggccgccgcgaaagtgttccacagcgggctggagattgtgatgtgcgggctggacgtcaccaaccgggcgctgctggcggcggattatctggcgacgctgccgacgctgaaccagaccggtaaaatgctccatgcgctgtttagccactatcgcagcggcagcatgagcagcggtctgcgcatgcacgacttgtgcgctattgcgtggctggcccgcccggaactgttcactctccagccgtgctttgtggcggtggagacgcaggggacctggaccgccggcaccacggtggtggatatcgaaggacgactgggccagccggcgaacgcccaggtggcgctggatatcgacgtcgaagggtttcagcgctgggcggcggaggtgattgccctggcgccgtgatatatcactcgattttcaaggagagaagcaatgacctatggacaggcgtatttgagcggctggaaagagacctttaattttagtggccgcgccagccggcagcagttcttgacgttttttctcatcaatgtattgatcgccgccgcgccagtggccgcctggagtctggccacccttgttgaccctcactacgggctcctcagttttgttgtcatatactttgcggcgctgtggctgctgatgatggcgatccccctgctggctgttggctgccggcgaatgcatgatatcggccgctccgggatctggtttgtgttgggagttatcattccgtggtttgcaattatttcgctggctctgtgctgcctgcgttcagcgccggcaccgtctcgctgagataatcgatcatcgcccgcatcctggcgggcatatgcttatctcccgcccacagtagccacaggtcgccggagtagctgctgataaattcccactcgggcagcacctgcacgatgtcgccgttcgccagcgcctcacgggcggtgaacagcggcaggctgccgatccctaaatgctgtctgaccgcgtcgaggcgtacggcggtatggttggcggcgtaccgcccgtaggtttgcaccgtttctgttttgccttcccgacggaacttccagcgcgcatcggcgggcgtttcgccaaggctaatgcagctatgcgcgcgcagatcctgcggcgtgtacggcgtaccgtgctgctgtaaataggcctcagtggcgcagataacgtgcctgattggcatcagcggtttgccatgcaggccgggggagggggtatcggtgatgcgtagcgccagatcaataccgtcatcgataaaatcgagagggcgatcttccagccgcaggcagacgtccacctgcgggtagcggtggaaaaacgccatcatcagcgggtggatcacaaagcggccgacggctttcgggacgcttagcgtcagctttccctgggcgaccgtttggcgactgcctgcggaatccattgcctgtcgcgccgcttccagcatctgctgggcatgctgatatatcgtttccccggcatcgctaagacgcagcttgcgggtggtacgctgcagcagtttgcagcccatctctcgctccagccgtgacacgctgcggctaacggctgaaggggtaatgccgttctggcgggcgacggcagagaagctgccctggtcgactatctgaacgaaaagagcgaggtcgggcaggaggttcagattcatttgtgctcccggagcaagagtgcattggctggtggtgggattatcgctgtcggcattaataatatactggccggacagagaggagaatcactatgactgaacgggtttattacaccagcgatgctaccgacgggcgcgcccagatcatcgcctgcactgcagaagcggatggccgttacgccatcgaactggagcggacgctgtttcacccgcaagggggcggtcaaccggcggaccgtggatggattgccgggcaggtggttgagacggtggctgtgcgcggcgaaagggtgctgcatattctgtcgcaaccccttcccctcggtgaagtggagatgaaaattgatgcctccgcgagacagctgcatgctcgtctgcattctgccggccacctgcttggcctggcgggcgaacagcttggctggcaaccggtgaaagcgcaccactggcccggcgaagggcggataacctttgccagcaggaatagcgccgcgctgccggacgccagtgcgctactggcgctagtaaaggcatggcaggcgcaggacttaccgcgtcaggtgacgttcgctgatggcatgcgcaaggtgggattcggcgagctgccagcctatccctgcggaggcacccacgtcgcccgtctggcggagctgggcgacattgtcattagtcagattaagatgaagaaggggcagctggtggtcagctacaccctggcgtaaggctttctgctctaccggaagtataatgtttccctagcatttcaatgctggtcggtcgagtttgccagatttagtgcatcttatttcttgaaaccaactgatgacgaaaacgtcgattatcgtctcagagagagcacccgcaaagcccgcatttcagcacaatcgtatagtttttactgatatcgtccgccgtttgtcataaatttctaattatcggcgtttttgagtagcggcccgctgacgggctggttactctgaaaacaatttacgtaatgttaacaaaagagaatagctatgcatgatgcacaaatccgcgtggccatcgccggcgcgggcggccggatgggacgccagttaattcaggctgcattgcagatggaaggcgtggcgctgggcgcggcgctggagcgcgaagggtcaagcctggtgggcagcgacgccggcgagctggcgggcgccggcaaagcgggcgtcgcggtgcagagcagcctggcggcggtaaaagatgatttcgacgtgttgatcgattttacccgcccggaaggcacgctgaaccatctggcgttttgccgcgagcacggcaaagggatggtcatcggcaccaccggttttgacgacgctggcaaacaggcgattcgcgatgccgcgcaggacattgccattgtcttcgccgctaactttagcgttggcgtcaatgtcctgttgaagctgctggagaaggcggcgaaggtgatgggcgactataccgacatcgaaattatcgaagcgcaccaccggcataaagtggatgcgccgtcaggcaccgcgctggcgatgggcgaagcgatcgccggggcattgaacaaagatcttaaggactgcgcggtctacagtcgtgaaggctacactggcgaacgcgtcccgggcaccatcggcttcgcgaccgttcgcgcgggcgatatcgtcggggagcatacggcaatgtttgctgacatcggtgagcgtattgaaatcacccataaagcgtccagccgcatgacctttgcaaatggcgccgttcgttcagcattatggctgaaaggcaagaaaaatggcctgtttgatatgcgtgatgtgcttgatttgaatgctttataacgattattacccatcgtgatgtggttattgctatcaataagttattgatgcagagggcaatattttgttgcccttttttatttttgcgtattacggttgatgttttgagtgtaacgcgtaaaaaatacagtattagcgtgttttttagtgaatgaaatgtaaattttgaccatctggtccacttttttgccgagcatcgctctgttttacactcttccacatccgcaagcgttttctcagccaggtttgttgatctttttggcgtaaaaatcacgtgttacgcatcagtggcgtaaaatgacattaaaaatctccgctttaagttgacttttatccgacatctctccagaatgccgccgtttgccaaaaatctgcgggcaacagatttgcattgattcagatcgtgtttatgaattaatatgcaaataaagtgagtggatattctctggaggatgttttgattaagtcagcgctattggttctggaagacggaacccagtttcacggtcgggccatcggggcaaccggcacggcggttggggaagtcgttttcaatacttcaatgaccggttatcaagaaatcctcactgatccttcctattcccgccaaatcgtcactcttacttatcctcatattggtaatgtcggcaccaacgccgccgatgaagaatcttctcaggtacatgcgcagggtctggttattcgcgacctgccgctgattgccagcaacttccgcagtactgaagacctctcttcttatctgaagcgccataacatcgtggcgattgccgatatcgatacccgcaagctgacgcgtctgctgcgtgagaaaggggcgcaaaacggctgcatcatcgcgggcgacagcccggatgcccagctggcgctggaaaaagcgaaagcgttcccgggcctgaacggcatggacttggcgaaggaagtgaccaccgcagaaacctatagctggacgcaaggcagctggaccctggcgggcgacctgccggaagcgaaagcggaaagcgagctgccgttccacgttgtggcatatgacttcggcgcgaaacgcaacatcctgcgcatgctggttgaccgcggctgccgcctgacggtggtgccggcgaagacctccgccgcggacgtgctggcgctcaatccggacggtatcttcctctccaacggccctggcgacccggcgccgtgcgattacgctatcgaggcgattgaaaaattccttgagaccgatattccggtattcggcatctgccttggccatcagctactggcgctggcgagcggtgccaagaccattaagatgaagttcggccaccacggcggcaaccacccggtgaaagatattgataacaacgtggtgatgatcactgcccagaaccacggtttcgccgtagatgaggcgacgctgccggccaacctgcgcgtgacccataagtcgctgttcgacggcaccctgcaggggatccatcgtaccgacaaaccggcgttcagcttccaggggcaccctgaagcgagcccggggccgcacgatgccgcgccgctgttcgaccactttatcgagttaattgagcaataccgtcagtccgcgaaataatcaggagtaaaagagcaatgccaaaacgtacagacataaaaagtatcctgattctgggcgcgggcccgattgttatcggtcaggcgtgtgagtttgactactccggcgcccaggcgtgtaaagcgctgcgcgaagagggctaccgcgttatcctggtgaactctaacccggcgaccatcatgaccgacccggaaatggccgatgccacctacatcgagccgattcactgggaagtggtgcgtaaaatcatcgaaaaagagcgcccggatgcggtgctgccgaccatgggcggccagacggcgctgaactgcgcgctcgagctggagcgtcagggggtactggctgaattcggcgtgaccatgattggtgccaccgccgatgcgattgataaagccgaagaccgtcgccgtttcgatatcgcaatgaaaaaaatcggcctcgacaccgcgcgctctggtatcgcccacacgatggaagaggcgctggcggttgccgccgacgttggtttcccgtgcatcatccgtccgtccttcaccatgggcggcaccggcggcggtatcgcctataaccgcgaagagttcgaagaaatttgcgaacgcggcctggatctctctccgaccaacgaactgctgatcgatgaatcgctgatcggctggaaagagtacgagatggaagtggtgcgcgataagaacgataactgcatcatcgtctgctccatcgaaaacttcgacgccatggggatccacaccggtgactccatcaccgttgccccggcgcagaccctgaccgacaaagagtaccagatcatgcgtaacgcctcgatggcggtgctgcgtgaaatcggcgtcgaaaccggcggctctaacgtgcagttcgcggtcaacccgaaaaacggtcgcctgatcgttatcgaaatgaacccgcgcgtctcccgctcctcggcgctggcctctaaggccaccggcttcccgattgctaaagtggcagccaagctggcggtaggttatacccttgacgagctgatgaacgacatcaccggcggccgcaccccggcttcctttgaaccgtccatcgactacgtggtcactaaaatcccacgctttaacttcgaaaaattcgccggcgccaacgaccgtctgaccacccagatgaagtctgtcggcgaagtgatggcgattggccgtacccagcaggaatctttgcagaaagcgctgcgcggtctggaagtgggcgctaccggctttgacccgaaagtgagcctcgacgacccggaagcgctgaccaaaatccgccgcgagctgaaagatgccggcgctgagcgtatctggtatatcgctgacgcgttccgcgcgggcctctcggttgacggcgtcttcaacctgaccaacatcgaccgctggttcctggtacagattgaagagctggtccgtctggaagagaaagtggcggaagtgggcatcaacggcctcgacgctgacttcctgcgcaccctgaagcgtaaaggctttgccgatgcgcgtctggcgaagctggcgggcgtgcgggaagcggaaatccgcaagctgcgcgaccagtatgacctgcacccggtctacaagcgcgtggacacctgcgctgcggaatttgctaccgataccgcctacatgtactccacttatgaagaagagtgtgagtccaacccgtccgttgaccgcgataaaatcatggtcctcggcggcggcccgaaccgtatcgggcagggtatcgaattcgactactgctgcgtacacgcctcgctggcgctgcgcgaggacggttacgagaccatcatggtcaactgtaacccggaaaccgtctctaccgactacgacacctccgaccgtctgtattttgagccggtgaccctggaagacgtgctggaaatcgtgcgcatcgagaagccaaaaggcgttatcgtccagtacggcggccagaccccgctgaagctggctcgtgccctggaagctgccggcgtgccggttatcggtaccagtccggacgctatcgaccgggcggaagaccgtgagcgcttccagcacgcggttgaccgtctgaagctgaagcagccggcgaacgccaccgtcaccgccattgagcaggcggtagagaaagcgaaagagattggctacccgctggtagtgcgtccgtcttatgtgctcggcggccgggcgatggagatcgtctatgacgagcaggatctgcgccgctacttccagaccgcggtcagcgtctccaacgacgcgccggtgctgctggatcgcttcctcgacgatgcgattgaagtggatgtcgatgccatctgcgatggcgaaatggtgctgattggcggcatcatggagcatatcgagcaggcaggcgtccactccggcgactccgcctgttccctgccggcctacaccctgagcaaagagattcaggatgtgatgcgcgagcaggtgcagaagctggccttcgagctgcaggttcgcggcctgatgaacgtccagttcgcggtgaaagataacgaagtttatctgattgaggtcaacccgcgtgcggcgcgtaccgtaccgttcgtctccaaagccaccggcgtcccgctggcgaaagtggcggcgcgcgtgatggccggtaagacgctggcgcagcagggcgtgaccaaagagatcatcccgccgtactactcggtgaaagaggtggtcctgccgttcaataaattcccgggcgttgacccgctgttagggccagaaatgcgctccaccggggaagtgatgggcgtcggccgcacctttgccgaagcgttcgccaaagcgcagctgggcagcaactcgaccatgaagaaacagggtcgcgcgctgctctccgtccgcgaaggcgataaagagcgcgtggttgacctggcggcgaagctgctgaagtttggcttcgagctggatgcgactcacggtacggcgattgtgctgggtgaagcgggcattaacccgcgtctggtgaacaaggtgcatgaaggtcgtccgcacattcaggaccgcatcaagaatggcgaatatacctacatcatcaacaccaccgcaggtcgccaggcgattgaagactccaagctgattcgccgcagcgcgctgcagtacaaagtgcattacgacaccaccctgaacggcggctttgccaccgcgatggcgctgaacgctgacgccaccgagaaggtgatttcggttcaggaaatgcacgcgcaaatcactaaataagcttcccggcctggccggatagcaacaatcctgggctgacgacatcgtcagcctattttttttggccgcagccatcttcagagagttctgcttttaaccccctgtcgggtcaggctaactatagttagcaccataacgatacctattgatgaaaagacaggaggatacaatgcggaacaatattctggtggcatccgcactggcagcgacggcaatcatgttcgtggccggctgctcatcgaatcagtcgatcaaaaccaccgacggcaagaccattgtcaccagcggtaaaccgcaggtggatgatgacaccggcctcgtctcatacaaaaatgccgaaaccggccgcgtggagcagattaaccgcgaccaggtgaagtccatggacgagctggataactaaggcctgacgttaaccctcagggcgcgcgttgcgtaagccatcgcgacataaatcacagttatcattgtaagcggttcgcttaactgtctacactcttgctgattacgacaagagcaaacgcaggccaatcaatgattctgataatttatgcgcatccttatccgcagcattctcatgcgaataagcgaatgcttgaacaggcagggacgcttgaaggcgtagagatacgctccctctatcaactctatcccgactttaatatcgatgtcgccgccgagcaggcggcgctggcccgtgccgatctggttatctggcagcatcctatgcagtggtatagcgtaccgccgctgctcaagctgtggatggacaaggtgctgtcgcacggctgggcctatggtcacaacggtattgccctgcgcggtaaatcgctgatgtgggcggtcactaccggcggcggtgaaagccactttgatatcggttcgtttcccggtttcccggtgctggcgcagcctctgcaggcaactgcgctttactgcgggatgaaatggctgccgccgttcgctatgcactgcacctttatctgcgatgatgaaacgctgcaggcgcaggcccgccgctatcgtcaacgcttaatcgactggcaggaggcacaccagaatggatagccatacgctgatacaggcgttgatttacctcggcgccgcggcgctgattgtgcccatcgccgtccgtctggggctggggtcagtgctgggctatctcatcgccggctgtattatcggcccgtgggcgctgcggctggtgaccgatgccgaggcgattctgcactttgccgagattggcgtggtgctgatgttgttcgtcattggtctggagctcgatccgcagcgcttatggaagctgcgcgcctcggtgtttggcggcggcgcactgcagatggtggcctgcggggtgttgatcggcctgttctgcatgctgctgggcctgcgctggcaggtggccgagctgattggtatgactctggcgctttcttccacagccattgctatgcaggcgatgaatgagcgcaatctgacggtgtcgcagatggggcgcagcgcctttgcggtgctgctgttccaggatatcgccgcgatcccgctggtggcgatgatcccgctgctggcggccagcggcggcgccacttcgctgatggcttttgccctctccgcgctgaaagtggccgcagcgctggcgctggtggtggtccttgggcgctatctgacccgcccgctgctgcgctttgtcgcccgttccggcctgcgcgaagtgttcagcgccgtggccctgttcctggtcttcggctttggcttattgctggaagaggtggggctgtcgatggcgatgggggcgtttctcgccggggtgctgctggccagttccgaatatcgtcatgcgctggagagtgatattgagccgtttaaaggactgctgttggggctgttctttatcggcgtcggcatgtcgattgattttggcaccctggtcacccatccgctgcgtattgtgattttgctggtcggtttcctggcgataaaaatgctgatgctgtggcttatcgccaggccgcttggcgtaccgcgcgcccagcgccgctggtttgcggtgctgctggggcaggggagtgagttcgcgtttgtggtgtttggcgccgcgcggatggcggatgtactggacggcgaatgggcaaaagcgttgaccctggcggtggccctgtcgatggcggcaacccccattctgctggtgctgctgacccgtctggagaaatcgtccagcggccaggcgcgtgatgctgacgagattgatgaagagcagccgcgggtgattgtcgccggctttggccgcttcgggcagattgccgggcgattgctgctctcgagcggggtgaagatggtgatcctcgatcatgacccggaccatgtcgataccctgcgcaaatttgatatgaaggttttctacggcgatgccacccgggtcgatctgctggagtcggccggggccgaaaaggcggaagtgctgatcaatgccattgacgatccgcacgtcagcctggagctggtggcgagggtaaaagagcattttccgcatctgcagatcatctcccgcgcccgcgatgtcgatcattacattcagctgcgccaggctggcgtcgaggccccggagcgtgaaaccttcgaggcggcgctgaagtccggccgaatgacgctggaggcgctggggctcggcgcctatgaagcgcgcgagcgggccgatctgttccgtcgattcaacctgcagatggtcgaagagatggtggcgatggcggaaaacgatgccgcgtcgcgggtggcggtcttcaagcggaccagcgatatgctgaccggcatcatcaacgaagatcgtcatcatctgtcgctggtgcagcgtcatggctggcaggggacggaagagggcaggcacaccggggatatcgccgatgagccggaaaataagccctcagcctgaggctgaccagtaacattttgttttcgtttggatcctcttctggcggcccacggtgtgaacgtgggcttgccagcaaatcagaaaattttcttattctttaccctccggccagtcgacgaagttgtacgctttccgtatagtggcgacaattttttgcactcgggaatgaatgaatgatcagtctgattgcggcgttagcggtagatcgcgtcattggtatggaaaacgccatgccatggaacctgcctgccgatctcgcctggttcaaacgcaacacgttaaataagccggtggtgatggggcgtctgacctgggaatccattgggcgcccattgccggggcgtaaaaatatcgtgatcagcagcaaacccggcagcgacgatcgcgtgcagtgggtctcctccgtagaagaagcaattgccgcctgcggcgatgtggaagagattatggtgatcggcggcggccgggtgtatgagcagttcctgccgaaagcgcagaagctctacttgacccatattgatgcggaagtggaaggcgatacccatttcccggattacgatccggacgaatgggagtcggtgttcagcgagtttcatgacgccgacgcgcagaactcccatagctactgctttgagatcctcgaacgccgttaagcgggcaggatagcgataaaaaaaccccggtcgcgtctggcgtgaccggggttttcttttgcatgaattgcgcgacgatggcgcactcagtatctcgtcatgtttcccgtcgcgggcttcgtcttctttctgaagcgctccccggggcgacaaatagcacttaaacgtaggtcgggtaaggcgttagccgtcacccgacacaaaattggctccgcgcccgcagttcttgcccggcggcgctgcgcttgcgcgggcctacgggactgcgtcgtgtttcccatcgcgggcttcgtcttctttctgaagcgctccccggggcgacaaatagcacttaaacgtaggtcgagtaaggcgttagccgtcccccgacacaaaagtggctccgcgcccgcagttcttgcccggcggcgctgcgcttgcgcgggcctacgggactgcgtcatgtttcccgtcgcgggcttcgtcttcctggagtgctgcccgggctacaaatggcaaggaaatgtaggtcgggtaaggcgttagccgccacccgacaaaacgacgccgcaggtagcccggataaggcgcaacgcgccgctatccgggaagagtcaggacgcgacggcttcgccttcgtcgaggcttttctgccggtttgacggctcggtgaagtactgcttatcttcccagcgcaggcaggtgagttccccgccccagcagcagccggtatccagggcgtaaatcccctccggcgtgccgcgtccctccagcgaagcccagtggccaaaggcaatgctgtaggcattgctgaccgggccgggaatggcaaaccacggcttcagcggcgccggggcgtcctcgggcgcttccttcgaatacatatccagctggccgttcgggaaacagtagcgcatgcgggtaaaggcgttagagataaagcgcaggcgcgccaggccgctcagctcgttgctccagtggttcggcatgtcgccgtacatggcatcgaggaagaaaggataggagtcgctggagagcactgcttcaacatcgcgcgcgcactgctgggcggtctccagatcccactgcggcgtaatgccggcatgggccatcaccagctttttctcttcatccacctgcagcagcggctggcgacgcagccagttgagcagctcatcggcatccggcgcttccagcagtggtttcagacgatccttcggcttgttgcggctgataccggcaaagaccgccagcaggtgtaagtcatggttgcccagcaccagtcgtacgctgtcgcccagagatttgacatagcgcaggacctccagcgatcccgggcctcgggccaccagatcgccggtcagccacagcgtatctctccgcggatcgaattcaacctgcgctaataatgcgatcagttcatcgtagcaaccgtgaacgtcgccaataaggtatgttgacattgttttaatgaatgagcgttggaactgcgagacggaaaacagggatctcaatacggaacggcgcgccgtcgatatcgatcatctcataatgaccctgcatggttcccagcggcgtttcaatcactgcgccgctggtatattgatattcaccgccggcgggaatatgcggttgctcgccgaccaccccttcaccctgaacttcagtctcacgaccgtggccgttagtgatgagccagtagcggccaagcagctgaacctgactccgccccaggttgcgaatggtgacggtgtaagcgaagacgtagcgctcttcttccggggaagactgcgattcgatatagacgctctgtacctggacacacacccggggcgaatgaatcatggttagctctccttcgttggcagattgtcagacagccagttggccatcaggcagtactgcgccacggaaatattttcggcgcgcatggccgggtcgatgcccagctcggtcagcacttccacgctgaacagattgccgagactgttgcggatagtcttgcggcgctggttgaacgcttcggtggtgatgcggctcagcacccggatctctttgaccggatacggcatggtgctgtgcggcaccaggcgtaccaccgcggagtcgaccttaggcggcggggtaaacgcgctcggcggcacttcgagtaccgggatcacctggcaataatattgcgccatcacgcttaaccgaccatacgccttactgttcggtccggcaaccagacgattcactacttccttctgcagcataaagtgcatatcggcaatggcatcagtatagctgaacagatggaacatcagcggggtcgagatattgtacggcaggttgccgaagacgcgcagcggctggcccattttctccgccagttcgccaaagttcatggtcatcgcatcctgctgatagatggtcagctttgcaccgaggaacggatgcgtctgcaggcgagccgccagatcgcggtccagttcgatgacggtcagctggtcaaggcgttcgccgaccggctcggtcagggccgccaggccggggccgatttcaaccatcgcctggcctttctgcgggttaatcgccgagacgatgctgtcgatcacaaactgatcgttgaggaagttctgcccgaagcgtttacgggctaaatggccctgatggactcgattattcattgggtattaacaatcattttgatggcgagattaagcgccgtgataaaactgccgacgtccgcttttccctggcccgctaattccagtgcggtgccgtggtcgacggaggtacgaataaaaggtaaaccgagcgtaatgttcacgccgcggccaaagccctggtattttagcacgggcaggccctgatcgtggtacatcgcgagtaccgcatcggcatgatcaagatattttggctgaaagagggtgtctgccggcagcggaccgctgaggttcatcccctttgcgcgcatctcttccagcaccggaatgatggtgtctatctcttctgttcccatatggccgccttcgccagcgtgcgggttaagcccgcaaaccagcacatgcggctgggcaatgccaaatttcgtgcgcaggtcgtgatcgagaatggtgatgatctcgcgcagtagctcgggggtaatcgcttcgctgatggctttcaacggcagatgggtggtgaccagcgccacccgcagctcctcggtcgccaacatcatcaccactttgctggccttcgcgcgctcttcaaagaactcggtatgaccggtaaaggcgataccggcgtcgttgatgttgcctttatgcaccgggccggtcactaacgccgcaaactcgccgctaaggcaaccgtcgcaggcgcgcgccagcgtctccactacgtaggcgccgttttgcacattcagcacgccgggctccgccgggacgtttagcggcacgttcagcagcgtcagggtaccggcgcgctgaggaacaggaggttgcgcgggatcgtaagggaggagagataaaggaagaccgagccgcttggctcggtcagttaacagggcgccatcggcgcaaatcaccagctcaactggccagtcgcgctgggcaagctgcacgaccaggtcagggccaatcccggcgggttcgccgggagtgataacaactttacgggtttcaggcatcgatattagttgctcagaattttaacatacgcactggcgcgctgttcctgcatccaggttgccgcttcttcagagaatttgcggttcatcagcatgcggtaagcacgatctttctgtgcggcgtcggttctgtcgacctgacggctatccagcagttcgatcagatgccagccaaaggaagagtgcaccggtccgctggtctgccctttgttcagacgcatcagcgcatcgcggaacgccgggtcaaagatgtccggcgtggcccagcctaaatcaccgccctggtttgccgaacccggatcttccgaataggttttcgccgcttgagcaaacgtgattttcccgctcttaatctcggctgcgatctgttccagcttagcctgagcctgggcgtcgttcatgatcggcgacggtttcagcagaatatgacgggcgtgaacctcggtaacggagatattctgggtaccaccgcgcaggtcgttgactttcagaatgtggaaaccaacgccggaacgaatcggaccgacgatatcccctttcttcgcggtgcttaacgcctgagcgaaaatgcccggcagttcctggatacggccccagcccatctggccacccttcagcgcctgttggtcagcggagtaggtgatcgccagtttgccgaagttggcgccgttgcgcgcctgctcaacgatggagtttgcttgctcctgggccgcggcgacttcgtcagaggtcgggttctccggcagcgggatcaggatgtggctcaggttgagctcggtgctggcgtcgttctggtcgccgatctgtttcgccagcgcttccacttcctgcggcagcacggtgatgcgacgacgcacttcattgttacgcacttccgaaatcagcatctctttacggatctggttacggtaggtgttgtagttgatgccttcatacgccagacggctgcgcatctgatccaaggtcatattattttgtttggcgatgttggcgatagcctgatcgagctggtcgtcagagatcttcacgcccatcttctgccccatctgtaacacgatctggtccatgatcagtctttcgaggatttgatggcgcagggtggcgtcatccggcagctgttggccagcctgaccagcattgagcttaaccgattgcatcaaaccatcgacgtcgctttccagcacgacgccattattgacgacggccgctactttatcgaccacctggggggcagcgaaactggtattcgcgatcatggcgataccgagaagcagcgttttccagttcttcatactttttccatttcgattaaccgcaaatgcggatgatgttgtaaaccagccgcatcacagggagctctggtacggtaaaatgttcgagcgcagcatctgctgggtgccgaggccgtagttagagctcagaccgcgcaattcgatattgattccgaaggtgttatcgtatttgctctcgccgccgttgtcgttgctgttccagccgttgactttacgttcgtagccaagacggatggcgtagcagcaggagttatactgcacacccaacatctggtttgctgctttccgggtattagtatcgtagtagtaggccccgaccacggaccagcgatcgacaatcggccaactggcggtcatccccacctgcgaaataccctgtttatattgtgccgcggtggaatatgacggcagcgtggcctgaatatattccgggctggcgtaacgatagttaagctggactaagcggttctcatcgcgacggtattcaatggtgccgttaccagtggcaacgttatccagacgcgtatcgtactggatccccccgcgcagaccccattcatcggcaatgcgccagtaggtatcgccggcccagaccagtgaacccgtggtatcgttgttctcccagttgatgttgtcatcaccggtgcgtgactcggtgaaatagtagatttgaccaacggaaatattaaaacgttccaccgcggcggcatcatacacgcgcgaggtgagcccggtggtgacctgattagccgacgcgatgcggtccagaccgctataggtacggtcgcggaacagaccggtgtaatccgactgcaacagcgtggagtcgtagttgccgatttcactctgatcgcggtacggcacgtacagatactgcacgcgcggttccagcgtttgggtgaatccctcctgcaggtcgcgttcaaagaccattttgccgtcgactttaaactgcggcattacgcggctgacggactctttatagtcagtgccgttggcggcattgtacttatcgaggttgctctgctggtagtgagtcgccagcagcttggcttcggtattcagactgccccaaccgttggacagcggcaggttgatcgtcggttcgaagtgaacgcgggtcgcttccggcatgttgttattcgagttaacaaaatgggcaacctgtccatagagatgggtatcgaacggaccgacatcattctggtagtagttgacgtcgagctgcggctcagccgaataggagttgctcgattcgcggtcaaagacctggaactgtttggtcgataccgtggcgtcaaagttctggttgacgtaaccggcgctgaatttctgcgtcgcatagccgtcggtactggaaccatatttcgagctgaagtcgttgaagtagtcaggatcgctgaccttggtgtagtcagcgttcagacgccatacctgatcgataacccctgagtggttccagtagaacagccagcggcggctgttgctgtcgctcgagtggtcgtcttcgtagactttatccgacggcaggtagtcgaattcagttaagccgctgccgagctgggtcagatagcggaactcgttttcccacatcacgccgccgcgtttgttcatatagtgcggagtaatagtggcatcgaagtttggcgcgatgttccagtagtacggcagggagaattccacgccgtttttggtgctgtatttcgcgttcgggatcaggaagcctgaacgacgcttatcgcccaccggcagctgcaggtaggggctatagaaaatcggcacagagccaagcttgaagcgggcgttccagatctcggcaacctgctcttcgcgatcgtggataacttcgctgccgacgacgctccaggtgtcggagcccggcagacaggaggtaaagctgccgttttcgagaatggtatagcggttttcaccgcgctgtttcatcaggtcggcggtgccgcgtccctggcgtccgaccatttgataatcgccctgccagacgttggtatctttggtattcagattcgaccaggcttttggccctttgaggatcacctggttatcgtcgtaatgcacgttgcccagcgcgtccaccgtgcgcaccggctgcgcctggcccgcggcctgctgctggtgcagctgaacttcgtcggcgcggaggcgactattcccctggttaatatcgacgttgccggtaaagacggcgttgtccgggtagttgcccttcgcatgatcggcgttaatcgtcaccggcagatcgccaggacgaccttccacgagcggacgatcatagcttggcacgccaagcatacattgcgttgcgagatcggcagcgaggccttgttggctatacaaggcgctggcaatcatcgtagccaggaggctgggaatacgttttttcatacgttgtatttattgttccatcatcttgtgacagcggcttgcaaacggtcagagcctaacttactcaacattatcacgctagtgttaatcctgcccgtttcgagcccgagcgttaggcaccctgttgaatgacgagtatgataaagcaaattataggctatgtcccacaattgaccgaggcgcgagtgccgggtaacgtgcggtcatattcgagcttaacggcgataaacagttggggagtctatgcagtatttgggtaaagtgattggcgtggcagtggctttgctgatgggtggtgggttctggggcgtggtgcttggctttctggtcggccatatgtttgaccgggcgcgcagccgccggttaaatctcttcgccaatcagcaggagcgtcagtcgctcttcttttccaccaccttcgaagtgatggggcacctgaccaaatccaagggccgcgttaccgaagcggatattcatgtcgccaatgtgctaatggatcgcatgaacctgcatggcgcctcgcgcaccgcggcgcagcaggcgtttcgcgacggtaaggccgacaactatcccctgcgcgagaaaatgcgtcagctgcgcagcgtctgctttggccgtttcgatctgattcggatgtttctggaaattcagctgcaggcggcgttcgctgatggcgaactgcatcctaacgaacgtgaagtgctgttcgtcattgccgacgagctcggcatctcccgcgcccagttcgatcaattcctgcggatgatgcagggcggcgcccagtttggcggcggttcgcagcagcgctcttatggccagcatggcggcaacgccggctggcagcaggcgcagcgtgggccgaccctcgaagatgcctgcaatgtgctgggagtaaaaccgaccgacgacgcggcgacggtgaagcgcgcctatcgcaagctgatgaacgaacatcatccggacaagctggtagcgaaaggtctgccgccggagatgatggagatggccaaacagaaggcccaggagatccagaaggcctgggagctgatcaaagagcagcgcggcttctgacgtttccagcccctcccgtccggcgaggggttttaacttttgaccttagcgcggcgatacagccgccgcggatggccaatttttccgtacagcatctccacttccagaaaaccggtctcaacgccgtgctccagatagcgacgggcggtggttttgctgagcccggcggcgctgaccacttcatcaacggaaaaacagtgcgcttcccggccgctaaacagtccctgcaccagcgccagcgttttctcttcaatccccttgctgccgctatccacgcgatagttcttcgcctgcagttgatagagggaatcgacgttttgctgatcgacgattttccactcccgttgctgatcgtagaactggataaagcgctccagcgactggctcagccgcttccatgataccggcttaaggatatagtcgaaggcgccgttgcggatggcctggctgcaggtttccatatcgctggcggcggtgataaagatcaccgagcattggctggtcgccagcgccgggtcggtcatcagcgtgacgcctttgccgtccggtaaatagttatccagcagcaccagctgcggcggcgtggcgtgaagcagctgccgcgcctgggcgagggaggccgccatgcctgccagccgcagtcgcgggtgtttttgcacaagctcggcgtgcaggcgcgccagttcgctctcatcttcaatgattagcacatcgaccaggtcatgatgcatcgtgggcctccggttgcggacaggcgtgcgcgtcggccgggataaatagggtgaagatcgttccccgcggcgcgttatcggcgacttcgatggtgccgcccgcctgagtgacataatgttcaataagatacagaccaatgccgtgatcgccacgggttttggtggtgacgccgcgttcaaaaatgcgctcgcggatatcggggcggatgccgacgccgcggtcggccacttcgataatcaactcccgggcgttgagctggatcaggacttccaccggctcatgcggcagctcggcacgctgcgtggcttcgatggcgttatccagcaggttgccgatgatggagatcagctcggattccatcagcgacggcagggggcggtcgatgcggcaggccgggtcgaagctcagcgccacgcctttttcgcgggcgcgggtggctttgccgagcagcagaccgcatagcgtcggcgagtggaagtgcgaggagataaagtccagtagctcctgagcatgttccgactgggcctgaatatagcggatcgcttcgtcataatggcccatatgcagcaggccggagagggtagtcatccggttgagctgctcgtggcgcatgatgcgcagattgtcgacatagcgcttcacctggctcagctgggcggtgagggcattgatttcattgcggtcacggaatgtgatcacccagccctgcagggtattctccagcataatgcgcacccgactggcgagcacggtcaactggttgaagcggcacagctcatcgtgggtatcgcgttcgagcatgtcgccgctggcgaaaaagggctgcggcgaaatgacgctgtcgatcgactgaccgcgcagctggcgggcgggctggctgagccccagcaggctgcgggcggcatggtttatcacctcaatacgccgctggcgatcgatgacgatcaccccctcaaagatcgactccatcatcgccttttgctggcgaaccagcaggccaatttcccgcggctcgagcgaaaaaatctgcttcttgatactgcgggtaaagtaccaggagaagataaacagggcgatgagcagcaggacggcggcgataaaaatattgatcactttagtcagagtaatgctgtcgagatagctggtgaggtagccgacggagacaataccgatcactcgccctgcgtcatcaacgatgggcgttttgctgcgcagcgagaccccgaggccgcctttgcgaatggtggtgatggattttccttccagtaccgcctggttgtcgccgccgaccagtcgggtgccgacccactccggatggacggaatgaaacagatgaactccctgacggtcgccgatgacgataaagctggcgtcgctatgggcggcgatttgctgcataaacgcctgaatcgcctgtgggtcgtgccggctgacctgttgacgtaaattcggcatcagggctatctcttcggcctgtattttggcccgggcgctcatctcctgataaagctggcggctggcgtcaaaataataataaatgcccagcgcgataaaaaggaccgagaaaaaagcgaccagagaaataaacagcttatattgaaaagataatttcataggccccggacgacgtattaaccataccggcactctaacatttttctgtcacgtgacgtaaatgttaagggaaagttgtgatcagcggcgcaggcgcgggctgccgccagcggtcgcggcggaaataggcggccggcgggaaataaaaaccataaaaaccacagtcataaatcagagatatatcactcccgggcagttcagcgaatagaaaccataaaaaccatagtgaccattaaaacttcttttttaatctgggaagcttcacattaacgacgccgctgtccctttacgctgaaaatgaataataacgacagggctgaatttatgagcaccacagacaatgcattctctgcaacccttgaaccgatcgatacgccgaaaaccacgctcaagcagcgctggtggcatattatggataactggaaggtggggatcgtcccgctgccgctgtttctgctggccggaggactgattgccctcgactgccttggcggcaaactgccgagcgatatcgtggtgatggtggccaccctggctttctttggcttcgcctgcggcgagtttggtaaacgcctcccggtgctggggaaactcggtgcggcggcgatctgcgccacctttattccttccgcgctggtccactatggtctgctgcctgacgtggttattgaatccacgaccaaattctataaatccactaacatcctctatctctatatctgctgcatcattgtcggcagcatcatgagtatgaaccgcaccacgctgattcagggctttctgaagatcttcttcccgatgctgtgcggcgaagtggtcggcatgctggtgggcatcggcgtcggcacgctgctgggcatggagccgttccaggtgttcttctttatcgtgctgccgattatggccggcggcgtgggagagggggcgatcccgctgtcaatgggttatgccgcgctgatgcatatggagcagggcgtggccctgggccgggtattgccgatggtgatgcttggcagcctgacggcgatcgtcatctccggctgcctcaaccagctcggcaagcgcttcccgcatctgaccggcgaagggcaactgatgccgaaccgcagccatgaaacccgcagcctcagcgagagcgaaggcgtgagcggtaagaccgacgttgggaccctcgcctccggcgcgctgctggcggtactgctgtatatgatggggatgctcggccacaaactgattggtctgccggcgccggtaggcatgctgttcctcgcggtactgttaaagctggctaacgtggtgtctccgcgtctgcaggaggggtcgcagatggtgtataaattcttccgcaccgcagtcacctacccgatcctctttgccgtcggcgtggcgatcactccgtggcaggaactggtaaacgccttcactttaaccaacctgctggtgatcgtcagtaccgtctccgcgctggtggcgaccggtttcctggttggtaaaaagatagggatgcacccgatcgatgtggcgattgtttcctgttgccagagcgggcagggcggcaccggcgatgtggcgatcctgaccgccggcaaccgcatgagcctgatgccgttcgcgcagatcgctacccgcatcggcggggcgataaatgtctcgctggggttgctgttcctcagccactatctggcgtgatataacgctacgctcagcgataaatctgctattttccgctacagaacgccgaaaatatctgcgttctgtatcctaaatgctccgcatttagcgttacaatcagcgcgcgatcggctatcgcaaccatcatcatgacagtccaggcgctgtcgtatttatcatatgtaggagaggaattaatgtcagtggatactcccgcccaggcgggcgtcagcatcgacgcattgctggcggcgaaagagcagcgtgcagcccgccaggccgactggttggcccattatcagcagcctgttatttccctgaccctggtgaccccgggggcggtgaaggacagcattcgctatcgcaatatgatgggcgttgccctccaggcctgcgatcagctgctgtggaagcaccgctggcaaacgctggatcgtcaggtgctatggctgccgaccgggccagaagcgctgtggtgcgtagcgcatccggccagcgaaatcaaagcgatgtgcagtacgctggagcagagccatccgctgggacgcctgtgggatatcgatgtaatctgtccgcagaacgggctggtgggacgccagtcgctgggcgaatcgcagcgccgctgcctgctgtgcgatgagccggcgcacgcctgtgcgcgcagccgtcgtcacgacaccgatctcgtcgtcgcccgcgttgagcagatgattgacgcgtggttcgcccgcgattaatcgggattgttttctgtatcctcactaatccgagttgcacgcagccaacccgcatgcaactcgaagtatgagcgttaaaagtcgatcggcgcgcgaaaggtcatcgcgttgccgtaggcaggatgggtgatggtgagcgtctcggcgtgcagcagcaggcgcggggccatcgccagcgcctccggcgtggcatagaagcggtcgccaaggatcggatgccccagcgccagcatatgcacgcgcagctggtgcgaccgtccggtaatcggcttcaggcgcacgcgggcggtgttatcctctgcgtactccagcacctcatattcggtttgcgccgctttgccggtttcatagcacaccttctgcattggccggttcggccagtcgcaaatcagcggtaaatccacgaggccttccgccggctgcggatggccccagacgcgggcgacgtactgcttcttcggctcgcgctcgcggaactgacgcttcagttcacgttcggcggctttattcagcgccaccacaatcacgccgctggtggccatatccaggcgatgcaccgattcggcctgcgggaagtcgcgctgaatgcgcgtcatcacgctgtctttatgctcctcaagacgaccggggacggacaacaagccgctcggcttgttgaccaccatgatgtgctcatcctgatacaggatcaccagccagggatcctgcggcggattgtagttttccatcgccatgttcgcgttccgttactggtgagtgacgacgatcagacgcagcgcgtccagacgccatccggcctgcgccagcgcatccatcacctgctgacggttgctttcgatcgccgccagttcgtcgtcacggatgttcgggttcaccgccttcagcgcttccagacgcgacagctccgccgtcagcttttcatcggcttcgttacgcgccgcgtcgatcagcccctgcgccgctttggcgatctgcgcttcaccctgctgcagaatcgcatgaacgtcctgctgcaccgcattgaccagcttgctaccggtatggcggttgaccgcgctcagctggcggttgaagctttcgaactccacctgcgcggcgaggttgttgccgttcttatccagcagcatgcgaaccggggtcgccggcaggaagcggttgagctgcagctgcttcggcgcctgcgcttcgacgacatagatcagctccagtagcagggtgccgaccggcagcgccttgttcttcagcagggaaatgttgctgctgccggtatcgccggaaaggatcaggtccagaccgttgcgtatcagcgggtgttcccaggtaataaattgcgcatcttcacgcgacagcgccacgtcacgttcgaaggtgatggtgcaaccgtcttccggcaggcccgggaaatccggcaccagcatatggtcggaaggggtgaggacgatcaggttttcaccgcggtcgtcctggttgatgccgacgatatcgaacaggttcatcgagaaagcgatcaggctggtgtcgtcatcctgctcttcgatgctctccgccagggcctgggctttctcgccgccgttggagtggatctccagcagacggtcgcggccctgctccagctgcgccttcagggcatcatgctgttggcggcaggatttgatcagatcgtcaaagccgtcggtggattccggcgccgcaagatagttgatcagttcatcgtgcacgctgtcgtagacggtgcgaccggtcgggcaggtatgttcgaaggcgtcgagcccttcgtgataccagcgcaccagcaccgactgcgcggttttttccaggtacggaacgtggatctggatatcgtgcgcctggccgatacggtcgagacgaccgatacgctgctccagcagatccgggttaaacggcaggtcgaacatcaccaggttgctggcgaactggaagttgcgtccttcggagccgatctcggagcacagcagcacctgggcgccggtgtcttcttcagcaaaccacgccgcggcgcggtcgcgttcgataatcgacatcccttcatggaacaccgcggcgcggatgccttcgcgctcgcgcagcacctgctccagctgcagggcggtggcggccttagcgcagattaccagcaccttctgcgagcgatggctggtcaggtagcccatcagccactcgacgcgcgggtcgaagttccaccaggtaccggtatcaccttcaaattcctgatagatctgctccggatagagcatgtcgcgcgcgcgctcttccgcggttttgcgcgcgcccataatgccggacactttgatggccgtctggtactgggtcggcagcggcagacgaatggtgtgcagctcgcgtttcgggaaacctttgacgccgttacgggtattacggaacagcacgcggctggtgccgtggcggtccatcagcatcgagatcagctcctggcgcgcggcctgggcatcttcgcgatcgctgttggcggcctgcagcagcggctcgatatcctgctcgccgatcagatcgcccagggtattgagttcgctatcgctcagcttgttgcccgccagcagcagcgcgacggcgtcggccaccggacggtagttctgctgttcttcgacaaactgttcaaaatcgtggaagcggttcggatccaacagacgcaggcgcgcaaaatggctctccattcccagctgttccggcgtcgcggtcagcagcaggatacccggcacgcgctcagccagctgttcaatagcctgatattcacggctcggcgcctcttcgctccacaccaggtggtgcgcttcgtcgaccaccatcaggtcccactcggcgtcgcacaggtgctccaggcgctgcttgctgcgacgcacgaagtctaaagagcagatcaccagctgttcggtttcgaacggattgtaggcatcgtgctgcgcttcggcgtagcgctcgtcgtcgaacagcgagaaacgcaggttgaaacggcgcagcatctccaccagccactggtgctggagggtttccgggaccacgatcagcacgcgctcggcggcgccggagagtagctgctggtgcaggatcatcccggcttcaatggttttacctaagcccacttcatcggccagcaggacgcgcggcgcgtgacgacggcccacatcgtgggcaatatgcagctggtgcgggatcaggctggtgcgctggccgcgcaggccgctccacggcatgcggtactgttcgctctggaacttgcgcgcgcggtagcgcagggcaaagcgatccatacggtcgatttggccggcgaacaggcggtcctgcggtttgctgaataccagtttgctgtcgagcagcacttcacgcagggtgacgttcgcttcctgggtgtccaggcgggtgccagtgtaggacagcagcccgttctcttcattcactttgtcaacgtggagctgccagccttcatggctggtgatggtgtcgcccgggttaaacattacgcgggtgatcggggaatcgttgcgagagtacagacggttttcgccgatggcggggaaaaggagagtgaccatgcgcgcatccagcgctaccaccgtccctaatcctagttcgctctctgtgtcgctaatccagcgttgaccaagtgtaaaaggcatatatgttcggctctttagttctttaattgcaggcaatagttgatcatctccatgaacaatcggagatgcgtcaaaattggggccaggaatggaaagggcgctatattactggatggcagaacgttcgtcacgttctcctcacgcttcatttttaggctttcgtgcccgtggaatgggtgaccaaaaatcaaaatagccccaactgtcctgtcactattgtagcaaagtcatcgttgacgaagggcaggatcccttccgccaccggctgcaactgctttgttaaatagtgatcgtaatcgagcggcgactgctggtaatccgccggctccgggccgctggtggtccagacgtatttgatggtgccgcgctgctgatactgctgcgcccgcccaagcttcaggttgtgttcatcggcaagccgggcggcgcgcacgtgcggcggtacgttgcgctgatactccgccagcggccggcgcaggcgtttgcgataaaccagctgttcgtcgagctcgccgttcatcagcctggcgatagtctcccgcacataatcctgatacggctggttgcggaagatgcgcaggtataactcctgttgaaactgctgggccagcggcgtccagtcggtacgcaccgtttccagccccttaaacaccatgcgctgggcatcgccctcctgaatcatcccggcatagcgcttcttgctgccggtatcggcgccgcggatcgtcggcattaaaaagcggcagaagtgggtttcatactccagctccagggcgctggtaagctggcttttgctaagctcctgcgcccaccaggcgttgacatcgctgaccagctcgcggccgatctccgccgcctgggcttcgctgtgcgggcgcttaagccagacgaaggtggagtcggtatcgccgtagataacgtcatagcctttggcttcaattaacgctttggtctggcgcatgatcgcatggccgcgcatggtgatcgacgaggcgagacgcgggtcgaagaagcggcaggcgctggtccccagcacgccgtaaaaggcgttcataatgatcttcagcgcctgggagagcggcttattgtgctggcgtttggcttcatcccggccgtgccagatctggctgacaatccccggcaggcagtgcttatctcgcgagaagcgggcgccgaggaagccctcgatactgtgctggtcatcgggttgcgccagcccttcaaccaggccgaccggatcgattaaaaaagtacgaataatcgacggatacaggcttttatagtccagcaccagcaccgagtcatacaggccggggcgggagtccatcacgtagccgccggggctcgcctgcggcggtacgtcgccgagattcggcgccacgtagcccaggcggtgcatgcgcgggaaatagagatggctgaaggcggcgaccgagccgccgtggcggtcggcgggcagaccgttgaccgtcgctcgttcgagcaaaaacggcatgatctccgttttgtggaagatccgcgtcaccagctcgcaatcctgcaggttatagatggccagcgccggtttgtcttcatgaaagcggcgatcgatctcatccatccgatcccatgggttgtcgatggctttgccttctcccagcagctcgcgggccaccgcctccagcgaaaaggaggagaaattccagaacgccgattttagcgcgtcgatgccgtcgataatcagccgcccgttggcctgggcgaaaaagacgccgttcttaaagccgtgctcacgccactccagctcgctgttgccgcggccgagtcgcagcgggatgcgatagcgttcggcgtgcttttgcagaacgcgcagatcgaactgcactacgttccagccgatcagcacgtcggggtcgtgttcggcaaaccaggcgttgagcttttccagcagcaggggacggctggcgatgaagaccagctcgaagtcgacgtctggcggcgtttccggttcggggcccagcatgtagaccacccgctggccgcagccttccagaccgatgcagtacagctcgccgtggcggctggtttcgatatccagcgacacccatttcagcggcggacgatagtcagggttcggcttcatgcgtgcgttgaccagctgcgagccgcgcgtttcgccttccacccacaccggggcggtgataaagcgctccatcagatagcgctccggcgggcggatatcgccttcgtaaacggtgacgccgctgtcgcggagcatcttctccagacgcatcaactggcgatgggcgcggcagtagaggccaacaattggctgacggtggaaatctttcagggccagcggggcgaagcggagccctttctccccctgcagcagccgttcagcctgcgcccgctgcgcttcgggaataaaggcgacggactcctgcggcgggagggttacctgcagcggaccgtcgtcggtggccagccagaaggagagctcggtgccctgcggagtgtcccgccagtgacgggtgagtaaaaatcctgctcgtggctgggtcacgggtattctcgccgataaaaaaccaggcctgattatagcctggtttcatgaggggtgctggggttttatacaggtgttcggcgctaatgttgctccggattgcggcttgcgccttatcccggctaccagatggcgcagagccctggccctgctaagcgcagcgcgagcagggtgattattggccgtagtaggctttggccccgtgcttacgcagatagtgcttatccagcagggtctgctgcatagccggcagctgcggcgccagctggcggcagaaaatccccatataggcgatctcttccagcacgatggcgttatgcaccgcgtcttcggcgttcttgccccaggcgaacgggccgtgggaatggaccagcacgccgggcatctgcgccgggtcgattccctgctggcggaaggtttcgacaatcacgttgccggtttcccactcatagtcgccgttgatctccgcatcggtcattaacctggtgcagggcaccgggccataaaagtagtcggcatgggtagtgccggtcgcgggaatagattgcccggcctgcgcccagatggtggcgtggcgcgaatgggtatgcacaatgccgcccagcgtcgggaaggcctgatacagcaggcgatgggtcggggtatccgacgagggctttttattaccctctaccacttcgccgctctccagactgaccaccaccatatcgtcggcggtcatcacgcggtaatccacaccggagggtttgatcacgaacacccctttctcgcggtcgacggcgctgacgttgccccaggttaaggtcaccagattatgctttggcagggccaggttagcttccagcacctggcgtttaagatcttctaacatagtgtgctccgaatagcaggcgagtcgggtatccctcaccccgaccctctcccggcgggagagggagaaaggcggcatggcgcccggtcggtcccctctccccaacggggagaggggaagggtgaggggacggcctcttagcgttttgaaccgtaatacacttcattccagcgcagcgcgtccttgaaggacggcagacgggtatcgttgtcgatgacggtcagctcgatatcatgcagctcggcgaactggcgcatatcgtcgaggttcagcgcatggctgaagacggtatggtgcgcgccgccggcgatgatccaggcttccgacgcggtacgcagatccggctgcgctttccacagggcgttggccaccggcagcttcggcagatcgtgcggcgttgggacggtttcgatggtattgaccagcagacggaagcggtctcccaggtcgatcaggctggcgacgatcgccgggccggtttgagtattgaagatcaggcgcgctggatccgctttgccgccgatgcccagcggctgaacgtcgaggatcggtttctcggcggtggcgatcgtcgggcacacttccagcatgtgcgagccgagcaccagatcgttaccattgtcgaagtggtaggtgtaatcctccataaaggaggtgccgccctgcagaccagttgacatcaccttcatgatgcgaagcagagcggcggttttccagtcgccctcgccggcaaagccgtagccctgctgcatcaggcgctgtacggcgagacccgggagctgtttcaggccgtggagatcttcaaaggtggtggtaaaggcgtggaaaccgccctgttcgaggaagcgtttcatccccagctcaatgcgcgcggcgtccagcacgttctggcgcttctcgccgtgaacctgcgctgccggggtcagacggtagctgctctcatattcatcgaccagggcgctgatatcgccgtcgctgatgctgttcaccacctgcaccagatcgccgaccgcccaggtgttcaccgagaagccaaacttaatctgcgcggcgactttatcgccgtcggtcaccgccacttcgcgcatgttatcgccgaaacggcacactttcagatgacgggtatcctgtttggagaccgcctgacgcatccagccgccgatacgctggtgggcctctttatcctgccagtggccggtgaccacgctgtgctgttggcgcatacgggcgccgatgaagccgaactcgcggccgccgtgcgcggtctggttcaggttcataaagtccatatcaatgctgtcccacggcagcgcggcgttgtactgagtatggaactgcagcagaggcttattgaggatggtcaggccgttgatccacatttttgccggcgagaaggtatgcagccagaccactaacccggcgcatttgtcatcgtagttggcgtcgcggcagatatgggtgatctcgtccggggtggtgcccagcggcttaaggaccagtttgcacggcagtttggcttccgcattcaggctgttcaccacatgttcggcatgcttcgtcacctggcgcagggcttccgggccgtacagatgttggctgccaataacgaaccatacttcatagttatcaaaaatcgtcattttcgtatccttaatgggtgagcgctgcctgagattgcggggctttttccgcctttgcagccgaagggagatagtgttgttccgcgctgaccgaccactgctggtagcgctgatagagttgttcgaaacgctgtgcctgcgccggacgcggctgcagggtagtttccacctggcttgccatccgctgttgggcggctggaatatcctcatagacgccggcggcgacggcggcgaagatagccgcccccagcgcgcagcactgatcggaggcgacaatctgcagcggacggttcagcacgtcgcagcaggcctgcatgatgacctggtttttccgcgcgataccgccaagcgccatgacgttgttaaccgggatcccctgctcggtgaagcactccataatggcgcgagcgccgaaggcggtggcggcgatcagaccgccgaacagcgccggcgcgtcggtggccaggttaaggtcggtgatcacccctttcaggcgctggttggcattcggcgtgcggcggccgttgaaccagtcgagcaccaccggcagatgctccagcgatggattgttggcccaggcttcggtgagcgccggcagtaactgtttttgactggctttgatttgctcgcgcaacgccggctgctgctgagccagctgctccagcggccagccgagaatgcggccaaaccaggcgtaaatatcgccgaaggcggactggcctgcctccatgccgataaagtgtggaaccacgctgccgtcgacctggccgcagatgcctttgaccgtgcgctcgccgacgctctctttatcggcgatcagaatgtcgcaggtggaggtgccgatgactttcaccagcgcgttaggctgcgcgccggcgccaacggcgcccatgtggcagtcgaaggcgccgccggagatggccacggtctgcgacagacccaggcgctgggcccactctgcgctcagcgtgccgaccggcacatcggccgtccaggtatcggtgaacagcggccaggccagatgctggttgatgatgggatcaagctcatcgaagaagctggccggcggcagaccgccccagctctcatgccacagcgatttatgtccggcgctgcagcggccgcggcgcagatcctgcggacgcgtagtaccggagagcagggcgggcacccagtcgcaaagctctacccacgaggcggctgcctgggcgacggcgctatcttcgcgggtgacgtgaaggattttggcccagaaccattcgctggagtagatcccgccgatatagcgcgagtaatcctctttgcccggctggtggcacaggcgggtgatcgcctcggcttcctcgaccgcggtgtgatccttccacaggacaaacatggcgttagggttgtcagcgaattcttcgcgcagcgccagcacgttgccctcggcatcgacgggagccggagttgagccggtgctgtcgacgccaatgcccacgacgtcggcgcgctgttcggcgctcagcgaagcgagcacgcttttcagcgccgcttccatggactcgatgtaatctcgcgggtgatggcggaagcggttgttagcgccatcgcaatactgtccttcccgccagcgcggataccactccacgctggtcgccagctctgcgccggacgcgcattccaccgccagagcgcggactgagtcactaccaaagtcgaggccaatcgcaattgccatcttgttactccatgcagaaatcattcatgcagcaacagtagatatccccggcaaaatccgtcaggccggattcgctaatcttatggattattttgctgttaccttgcaaagtgtgacgccgtgcaaatattcgatgtggacttttctgccgtatttatagacacttttgttacccggcatatcacggtggaatgcacgctgctggcgcttttttcgcttgctgtgcgggtttttcgccaaattcccaccgccgtcgcagtcgcgacagggccgagagcgataaaatgatgaatatggacaattggtgccactgataccttcggggagaaccacgcgtatggccgaaacgcaaaacgatccgctgctgccgggctactcttttaacgctcatctggtcaccggcctgacgccgattgaggcgcagggatacctggatttctttatcgaccgcccgctgggtatgaaaggctatattctcaatctgacgatccgcggcgagggggtgatcaacaaccacggcgaacagtttgtctgccggccgggcgatatgctgctgttcccgcccggggaaattcatcactatggccgccatcccgacgccagcgagtggtatcaccagtgggtctacttccgcccgcgcgcctactggcacgagtggctcaactggccaacgatttttgcccagaccggctttttccgtccggatgaacagtggcaggcgcgctttggcgagctgttcggccagatcgttgatgccgggcagggggctgggcgctattccgaactgttggcgataaacctgctggaacagctgctgctgcggcgcatggaggcgatcaacgaatcgctgcatccgccgctggacaaccgggtgcgcgacgcctgccagtacatcagcgaccatctggcggacagccattttgatatcgccagcgtcgcccagcacgtctgcctgtcgccctcgcgtctgtcgcacctgttccgccagcagctgggggtcagcgtcctcggctggcgggaggatcagcgcatcagccaggccaaactgttgctcagcaccacgcggatgccgatcgccaccgttgggcgcaacgtcggcttcgaagatcagctctatttttcccgcgtgtttaaaaaatgcaccggggccagcccgagcgaattccgcgcgggttgtgaataaaaagtaaagaaagtgaaatgatgacccgcttaaatgtcacagccagtaaactattaagacaattgatggcttgacgacggcgcgatggcttcggagaatccgggcttcgttttttaaccgggtacattatgcaagcattgctcgaacactttattacccaatccacggtctactcattgttagccgtgatgctggtggcctttctcgagtcgctggcgctggtggggcttatcttacccggcacggtgatgatggctggccttggggcgctcatcggcggcggcgaagttaacttctggcaggcgtggctggcggggattgtcggctgcctgctgggcgactggatctcattctggctcggctggcgctttaagaagccgttgcaccgctggtcgtttatgaagaaaaaccgcgccctgctggagaaaaccgagcatgcgctgcatcagcacagcatgatcaccattctgattggccgctttgtcggaccgacgcgtccgctggtgccaatggtcgccgggatgctcgacctgccggtggccaagttcgtgctaccgaatattatcggctgcctgctctggccgccgctctatttccttccgggcatcctcgccggggcggcgattgatattccggctgatgaaaacagcgccagctttaaatggctgctattgggggcggcgctgctggcctggctggcgggatggctgtgctggcggctgtggcggagcgcgaaaacctcaggcgatcggctgacccgctggctgccgcgcggccgactgctgtggctgtcgccgctgatggtcgcgctggcggctacagcgttaacatttgtcttccgccatccgctgatgccggtctatctggcgatcctgcacaaggtcatcgcgcgctgatccccatcaaatgcgaggcgctgctgtggccgcttaacagctcggcggtggcgccatcccagacaatgcgcccttcggcgaccaccatcgagcgcggcgcgatgcgcgcggcgtcctctacgctgtgggagaccatcagcagggtgagctgctgctgctcgcagacatcggcgaccagggacagcatctcctggcgcagcgccggatcgagcgccgagaagggttcatccagcagcagcaccggctgctggcgcaccagacagcgggccagcgccgcgcgctgccgctgaccgccggagagctcgccgggcagacgttccagcagcgcatcaattcccatctgtccagctatcgccgtgacctgcgcctgctgctcgcggctcagtttaaggcctgggtggatgccgaggctgatattttgtcgaatggtcagatggttaaacaggttattctcctgaaacaacatcgagaccggacgctgcgccggcggcgtcgcgttatgcgcctcgccgttaatcagcaggctgccgctggcgggtggcagaaacccggcgatcagattcagcagggtgctctttccggcgccgctgggaccgagcaccgcgatgcgctccccgcgcgcgacgtcgagggtgaagcgcatcggcagatgctggtatagccaggtcacatcattgagttttagcatcacgccccggaagtttttcaatcagcgtaaacaacaagaaacagagcagcagcaggagcagggcggtgacggccccgtcctggctgcggtaggcgcctatctgctggtacagatagaaaggcagggtgcggaacgcctcgttgccgaacagcgccaccacgccgaaatcgccaatcgacagtacgcaggcgaaggcgagcgcctgggccagcgggcgccggagagcgcgaagctcgaccacccgcagccgggcaaagccttcaatacccagcgactggcacagcatgctgtagcgggcggcaatgtcgcgcatcgggttttccagtactttcagcgcataggggatcgccatcagggcattagtgaagatgacgatgccgtcggcggactccggcaggccgatagtgttattgagcagcaggaagaagccggtcgccagcacaattcccggcatcgcaaggatcagcatgccgctcagctccattgcctgcccggccaacggccgctggcgagagcgcagctcccggctgctccataacagcatcatcgtcagggtcacgctcaatagcccggcggcgatggcgatgcgtagagaggtgctcaatgcctgccagagcgctggctgcgccagcacgtccagcatattacggttgatcccgtcgacgatgaccgccagcagcggcgggagcagcagcagcagggcggcgccgatcagcaacccgtcgctcaggcggctatgcaggcgatcgtcagggtcgcgccagccgcgcacatggctgacgccgatggcgacggctttactcagacgctggctaagcagcaccagcccaaggcagcagagcatctggatcagcgccagcattgccgctcgcgccggatcgtagtcaaagctcagcgcctggtagatagccaactcgatcgtggtggctttcgggccgccgcccagcgagagcacggtggcgaagctggcgaagcagagcataaaaatcagcgcggcgacggcgggaatgtgccggcgcagccacggccattcgacgaggcggaagaaggcatagccgcgcatgccaagctgggcggcaatttgccgctgctcgccgggaatgttctccagcgcctgcagcagcagacgggtcgccatcggcatattgaaaaagacgtgcgccagcaggatgccctgcagaccgtagggcgagaactcccattgccagccgagcgcgtgaaatagtgaggccagccagccctggcggccatagacgctgaggataccgaacaccgccaccagcaccggcaggatcagggtcatcgcgcacaggcgcagcagcagcgtacggcccgggaagcgacgccggtaaagcgcgcgggcgagaaagatggctggtcccaccgagatcagcgctgacagcgacgcctgccagaaggagaagcggaccacatgccacaggtagctatcgctgaagaccgattgccagcccgcgccgggggcgctaaaccacagcgccagaaacgccgccagcgcgacagcgcacagcagcgtagcggcgaacaggcccggc
